(19) United States
(12) Patent Application Publication
(10) Pub. No.: US 2026/0159836 A1
(43) Pub. Date: Jun. 11, 2026

(54) OLIGONUCLEOTIDE-MEDIATED KNOCKDOWN OF PLN

(71) Applicant: Soufflé Therapeutics, Inc., Watertown, MA (US)

(72) Inventors: Vadim Dudkin, Wellesley, MA (US); Timofey Zatsepin, Brookline, MA (US); Roman Bogorad, Newton, MA (US); Duncan Brown, Berkeley, CA (US); James McSwiggen, Arvada, CO (US); Jordan Chambers, Watertown, MA (US)

(21) Appl. No.: 19/411,019

(22) Filed: Dec. 5, 2025

Related U.S. Application Data
(60) Provisional application No. 63/728,317, filed on Dec. 5, 2024.

(51) Int. Cl. C12N 15/113; A61K 31/712; A61K 31/7125; A61K 31/713

(52) U.S. Cl. CPC C12N 15/113; A61K 31/712; A61K 31/7125; A61K 31/713; C12N 2310/11; C12N 2310/14; C12N 2310/315; C12N 2310/321; C12N 2310/322

(57) ABSTRACT

Provided herein are oligonucleotides for inhibiting the expression of phospholamban (PLN) and methods of using the oligonucleotides for reducing PLN expression in a subject.

### CROSS REFERENCE TO RELATED APPLICATIONS

[0001] This application claims the benefit of U.S. Provisional Application No. 63/728,317 filed on Dec. 5, 2024, the entirety of which is incorporated herein by reference.

### INCORPORATION BY REFERENCE OF SEQUENCE LISTING

[0002] The present application is being filed along with a Sequence Listing in electronic format. The Sequence Listing is provided as a file entitled 360770-0002_SeqList_ST26.xml, created Dec. 4, 2025, which is 17,820,546 bytes in size. The information in the electronic format of the Sequence Listing is incorporated herein by reference in its entirety.

### BACKGROUND

[0003] Phospholamban (PLN, also referred to as CMD1P, PLB, cardiac phospholamban, or CMH) denotes an essential regulator of cardiac contractility. PLN serves as a primary substrate for the cAMP-dependent protein kinase in cardiac muscle. The protein it encodes acts as an inhibitor of the cardiac muscle sarcoplasmic reticulum Ca(2+)-ATPase when in its unphosphorylated form, with the inhibition being lifted upon phosphorylation of the protein. This phosphorylation triggers the activation of the Ca(2+) pump, which enhances muscle relaxation rates and contributes to the inotropic response initiated by beta-agonists in the heart. PLN protein is a significant regulator of diastolic function in the heart. Mutations in this gene are linked to inherited human dilated cardiomyopathy resulting in refractory congestive heart failure, as well as familial hypertrophic cardiomyopathy.

[0004] Focusing on PLN for the prevention and/or treatment of heart failure with reduced ejection fraction (HF-rEF), arrhythmias, and/or cardiomyopathy is crucial, as IF-rEF is a leading cause of mortality and morbidity. The defining features of heart failure include impaired cardiac contraction and relaxation, coupled with irregularities in calcium handling and β-adrenergic signaling (Lou, Q, et al. Adv Exp Med Biol. 2012; 740: 1145-1174). In cardiomyocytes, cytosolic calcium is vital for regulating contraction and relaxation through the excitation-contraction coupling mechanism. Calcium influx via L-type calcium channels triggers calcium-induced calcium release from the sarco(endo)plasmic reticulum (SR) via ryanodine receptors, leading to cardiac contraction. The active relaxation process involves the transportation of calcium from the cytosol back into the SR, mediated by the SR Ca2+ ATPase (SERCA2a), whose activity is modulated by the small phosphoprotein PLN (Kranias, E G, et al., Circ Res. 2012; 110(12): 1646-1660).

### SUMMARY

[0005] In some embodiments, the present disclosure provides an oligonucleotide for inhibiting expression of phospholamban (PLN), wherein the oligonucleotide comprises an antisense strand comprising at least 14 contiguous nucleotides substantially complementary to a sequence of nucleotides encoding PLN, with no more than 4 mismatched nucleotides.

[0006] In some embodiments, the present disclosure provides a pharmaceutical composition comprising the oligonucleotide described herein, or a pharmaceutically acceptable salt thereof, and a pharmaceutically acceptable carrier or excipient.

[0007] In some embodiments, the present disclosure provides methods of using provided oligonucleotides. In some embodiments, the present disclosure provides a method for inhibiting PLN expression or treating a PLN related disorder in a subject, the method comprising administering an effective amount of an oligonucleotide described herein, or a pharmaceutically acceptable salt thereof, or a pharmaceutical composition comprising an oligonucleotide described herein to the subject.

### DETAILED DESCRIPTION

[0008] Provided herein are oligonucleotides for inhibiting the expression of phospholamban (“PLN”). In some embodiments, the oligonucleotide comprises an antisense strand substantially complementary to a sequence encoding PLN. In some embodiments, the antisense strand comprises at least 14 contiguous nucleotides (for example, 14, 15, 16, 17, 18, 19, 20, 21, 22, 23, 24, 25, 26, 27, 28, 29, 30, 31, 32, 33, 34, 35, 36, 37, 38, 39, or 40 contiguous nucleotides) substantially complementary to the sequence of nucleotides encoding PLN, with no more than 4 mismatched nucleotides.

[0009] The term “antisense strand” refers to an oligonucleotide having a nucleotide sequence substantially complementary to a target sequence in a transcript, e.g., an mRNA encoding PLN. In embodiments wherein the oligonucleotide is an RNAi agent, the term antisense strand may be used interchangeably with the term “guide strand”. In some embodiments, an antisense strand disclosed herein is 14, 15, 16, 17, 18, 19, 20, 21, 22, 23, 24, 25, 26, 27, 28, 29, or 30 nucleotides in length.

[0010] The term “sense strand” refers to an oligonucleotide having a nucleotide sequence substantially complementary to an antisense strand, e.g., the antisense strand of an RNAi agent herein. The term “sense strand” may be used interchangeably with the term “passenger strand.” In some embodiments, a sense strand disclosed herein is 12, 13, 14, 15, 16, 17, 18, 19, 20, 21, 22, 23, 24, 25, 26, 27, 28, 29, 30, 31, 32, 33, 34, 35, 36, 37, 38, 39 or 40 nucleotides in length. For example, each of the sense strands in Tables 1A-1C is 19 nucleotides in length and substantially complementary to the corresponding antisense strand shown in the same row.

[0011] As used herein, and unless otherwise indicated, the term “complementary,” when used to describe a first nucleotide sequence in relation to a second nucleotide sequence, refers to the ability of an oligonucleotide comprising the first nucleotide sequence to hybridize and form a duplex structure under certain conditions with an oligonucleotide comprising the second nucleotide sequence, as will be understood by the skilled person. In some embodiments, a duplex structure disclosed herein is 12, 13, 14, 15, 16, 17, 18, 19, 20, 21, 22, 23, 24, 25, 26, 27, 28, 29, or 30 base pairs in length.

[0012] The terms “complementary”, “completely complementary” and “substantially complementary” herein can be used with respect to the base matching between the antisense strand of an oligonucleotide, e.g., an RNAi agent, and a target sequence, or between the sense strand and the antisense strand of an RNAi agent, as will be understood from the context of their use. Complementary sequences, e.g., between an antisense strand and a target sequence in a target transcript, or between the sense and antisense strand of an siRNA, include base-pairing of the oligonucleotide or polynucleotide comprising a first nucleotide sequence to an oligonucleotide or polynucleotide comprising a second nucleotide sequence over the entire length of one or both nucleotide sequences. Such sequences can be referred to as “completely complementary” with respect to each other when there are 0 mismatched base pairs upon hybridization of the two sequences. However, where a first sequence is referred to as “substantially complementary” with respect to a second sequence herein, the two sequences can be completely complementary, or they can form one or more, but generally not more than 5, 4, 3, 2, or 1 mismatched base pairs upon hybridization for a duplex up to 30 base pairs, while retaining the ability to hybridize under the conditions most relevant to their ultimate application, e.g., inhibition of gene expression via a RNA-induced silencing complex (RISC) pathway. However, where two oligonucleotides are designed to form, upon hybridization, one or more single stranded overhangs, such overhangs shall not be regarded as mismatches with regard to the determination of complementarity. For example, an siRNA comprising one oligonucleotide 21 nucleotides in length and another oligonucleotide 19 nucleotides in length, wherein the longer oligonucleotide comprises a sequence of 19 nucleotides that is fully complementary to the shorter oligonucleotide, can yet be referred to as “completely complementary” for the purposes described herein. The terms “targets” or “targeting”, when used in phrases such as an oligonucleotide targets/targeting a sequence, the terms mean that the oligonucleotide (or a sense or antisense strand within the oligonucleotide) is substantially complementary or completely complementary to the sequence.

[0013] “Complementary” sequences, as used herein, can also include, or be formed entirely from, non-Watson-Crick base pairs or base pairs formed from non-natural and modified nucleotides, in so far as the above requirements with respect to their ability to hybridize are fulfilled. Such non-Watson-Crick base pairs include, but are not limited to, G:U Wobble or Hoogsteen base pairing.

[0014] If an RNA strand contains one or more thymidines (“T”s) in the sequence, the thymidines (“T”s) represent uridines (“U”s). For example, the nucleotide “T”, as used in the unmodified siRNAs sense and antisense strands in Table 1A, for example, SEQ ID NOs: 1-91, 600-719, and 1228-1256, represents RNA uridine, and the corresponding RNA sense and antisense strands are listed in Table 1C.

[0015] In some embodiments, the present disclosure provides an oligonucleotide or RNAi agent, as described herein, or a pharmaceutically acceptable salt thereof. As used herein, the term “pharmaceutically acceptable salt” refers to those salts which are, within the scope of sound medical judgment, suitable for use in contact with the tissues of humans and lower animals without undue toxicity, irritation, allergic response and the like, and are commensurate with a reasonable benefit/risk ratio. Pharmaceutically acceptable salts are well known in the art. For example, S. M. Berge et al., describe pharmaceutically acceptable salts in detail in, J. PHARMACEUTICAL SCIENCES, 1977, (66); 1-19, incorporated herein by reference. Pharmaceutically acceptable salts of the nucleic acids and analogues thereof of this disclosure include those derived from suitable inorganic and organic acids and bases. Salts derived from appropriate bases include alkali metal, alkaline earth metal, ammonium and N⁺(C₁₋₄alkyl)₄ salts. In some embodiments, a pharmaceutically acceptable salt is the sodium salt. In some embodiments, a pharmaceutically acceptable salt is the potassium salt.

[0016] In some embodiments, the oligonucleotide comprises an antisense strand comprising at least 14 contiguous nucleotides (for example, 14, 15, 16, 17, 18, 19, 20, 21, 22, 23, 24, 25, 26, 27, 28, 29, 30, 31, 32, 33, 34, 35, 36, 37, 38, 39, or 40 contiguous nucleotides) substantially complementary to a sequence of nucleotides within a transcript encoding PLN. In some embodiments, the antisense strand has no more than 5 mismatched nucleotides to the sequence of nucleotides within the transcript encoding PLN. In some embodiments, the antisense strand has no more than 4 mismatched nucleotides to the sequence of nucleotides within the transcript encoding PLN. In some embodiments, the antisense strand has no more than 3 mismatched nucleotides to the sequence of nucleotides within the transcript encoding PLN. In some embodiments, the antisense strand has no more than 2 mismatched nucleotides to the sequence of nucleotides within the transcript encoding PLN. In some embodiments, the antisense strand has no more than 1 mismatched nucleotides to the sequence of nucleotides within the transcript encoding PLN. In some embodiments, the antisense strand is completely complementary to the sequence of nucleotides within the transcript encoding PLN (e.g., 0 mismatches).

[0017] PLN is a single protein. Exemplary sequences encoding PLN may be found, for example, at NCBI RefSeq ID NM_002667.5 (SEQ ID NO: 2523). In some embodiments, PLN is encoded by a nucleotide sequence corresponding to the transcript having the NCBI RefSeq ID NM_002667.5 (SEQ ID NO: 2523).

[0018] In some embodiments, the sequence of nucleotides encoding PLN comprises a nucleotide sequence having at least 75% nucleotide sequence identity to SEQ ID NO: 2523. In some embodiments, the sequence of nucleotides encoding PLN comprises a nucleotide sequence having at least 80% nucleotide sequence identity to SEQ ID NO: 2523. In some embodiments, the sequence of nucleotides encoding PLN comprises a nucleotide sequence having at least 85% nucleotide sequence identity to SEQ ID NO: 2523. In some embodiments, the sequence of nucleotides encoding PLN comprises a nucleotide sequence having at least 90% nucleotide sequence identity to SEQ ID NO: 2523. In some embodiments, the sequence of nucleotides encoding PLN comprises a nucleotide sequence having at least 95% nucleotide sequence identity to SEQ ID NO: 2523. In some embodiments, the sequence of nucleotides encoding PLN comprises a nucleotide sequence having at least 99% nucleotide sequence identity to SEQ ID NO: 2523.

[0019] In some embodiments, the antisense strand is substantially complementary to a sequence of nucleotides corresponding to an untranslated region of the PLN transcript. In some embodiments, the antisense strand is substantially complementary to the sequence of nucleotides corresponding to an untranslated region of the PLN transcript with no more than 5, 4, 3, 2, 1, or 0 mismatches. In some embodiments, the antisense strand is completely complementary to the sequence of nucleotides corresponding to an untranslated region of the PLN transcript.

### RNAi Agents

[0020] In some embodiments, the oligonucleotide is an RNAi agent or RNAi trigger for inhibiting expression of PLN. As used herein, an “RNAi agent” or “RNAi trigger” refers to an oligonucleotide molecule capable of inducing RNA interference (RNAi), which mediates the targeted cleavage of an RNA transcript via an RNA-induced silencing complex (RISC) pathway. The RNAi agents disclosed herein include but are not limited to: short (or small) interfering RNAs (siRNAs), double stranded RNAs (dsRNA), micro RNAs (miRNAs), short hairpin RNAs (shRNA), and dicer substrates (e.g., DsiRNAs).

[0021] In some embodiments, the RNAi agent is a double stranded RNA molecule comprising an antisense strand and a sense strand that are complementary to one another and hybridize to form a duplex or double stranded region. One strand of the RNAi agent, the antisense strand or guide strand, includes a region of complementarity to a target sequence in PLN. The other strand, the sense strand or passenger strand, includes a region that is complementary to the antisense strand, such that the two strands hybridize and form a duplex structure when combined under suitable conditions. In some embodiments, the double stranded RNA molecule may be formed by base pairing between two separate molecules of RNA (e.g., an antisense strand and a sense strand). In some embodiments, the double stranded RNA molecule is a self-complementary molecule formed by intramolecular base pairing between two separate regions of a single RNA molecule (e.g., an antisense region linked to a sense strand through an unpaired RNA linker forming a loop or hairpin loop).

[0022] Where the two strands are part of a self-complementary molecule, the connecting RNA chain is referred to as a “hairpin loop.” A hairpin loop can comprise at least one unpaired nucleotide. In some embodiments, the hairpin loop can comprise at least 4, at least 5, at least 6, at least 7, at least 8, at least 9, at least 10, at least 20, at least 23 or more unpaired nucleotides or nucleotides not directed to the target site of the dsRNA. In some embodiments, the hairpin loop can be 10 or fewer nucleotides. In some embodiments, the hairpin loop can be 8 or fewer unpaired nucleotides. In some embodiments, the hairpin loop can be 4-10 unpaired nucleotides. In some embodiments, the hairpin loop can be 4-8 nucleotides. In some embodiments, the hairpin loop can contain 1-4 oligoethyne glycols, including ethylene glycol, di ethylene glycol, triethylene glycol, tetraethylene glycol, hexaethylene glycol, or any combination thereof.

[0023] Where the two substantially complementary strands of a double stranded RNA molecule comprise separate RNA molecules, those molecules need not, but can be covalently connected. In certain embodiments, where the two strands are connected covalently by means other than an uninterrupted chain of nucleotides between the 3′-end of one strand and the 5′-end of the respective other strand forming the duplex structure, the connecting structure is referred to as a “linker” (though it is noted that certain other structures defined elsewhere herein can also be referred to as a “linker”). The RNA strands may have the same or a different number of nucleotides. The maximum number of base pairs is the number of nucleotides in the shortest strand of the double stranded RNA molecule minus any overhangs that are present in the duplex.

[0024] In some embodiments, the RNAi agent is an siRNA.

[0025] In some embodiments, the RNAi agent is a shRNA.

[0026] In some embodiments, the RNAi agent is a dicer substrate (e.g., a Dicer-substrate siRNA).

[0027] In some embodiments, the sense and antisense strands of the dsRNA are each independently about 15 to about 30 nucleotides in length, or about 25 to about 30 nucleotides in length, e.g., each strand is independently between 15-29, 15-28, 15-27, 15-26, 15-25, 15-24, 15-23, 15-22, 15-21, 15-20, 15-19, 15-18, 15-17, 18-30, 18-29, 18-28, 18-27, 18-26, 18-25, 18-24, 18-23, 18-22, 18-21, 18-20, 19-30, 19-29, 19-28, 19-27, 19-26, 19-25, 19-24, 19-23, 19-22, 19-21, 19-20, 20-30, 20-29, 20-28, 20-27, 20-26, 20-25, 20-24,20-23, 20-22, 20-21, 21-30, 21-29, 21-28, 21-27, 21-26, 21-25, 21-24, 21-23, or 21-22 nucleotides in length.

[0028] In some embodiments, the duplex structure is between 15 and 30 base pairs in length, e.g., between, 15-29, 15-28, 15-27, 15-26, 15-25, 15-24, 15-23, 15-22, 15-21, 15-20, 15-19, 15-18, 15-17, 18-30, 18-29, 18-28, 18-27, 18-26, 18-25, 18-24, 18-23, 18-22, 18-21, 18-20, 19-30, 19-29, 19-28, 19-27, 19-26, 19-25, 19-24, 19-23, 19-22, 19-21, 19-20, 20-30, 20-29, 20-28, 20-27, 20-26, 20-25, 20-24, 20-23, 20-22, 20-21, 21-30, 21-29, 21-28, 21-27, 21-26, 21-25, 21-24, 21-23, or 21-22 base pairs in length.

[0029] An RNAi agent as described herein can further include one or more single-stranded nucleotide overhangs, e.g., an overhang of 1, 2, 3, or 4 nucleotides. RNAi agent having at least one nucleotide overhang can have unexpectedly superior inhibitory properties relative to their blunt-ended counterparts. A nucleotide overhang can comprise or consist of a nucleotide/nucleoside analog, including a deoxynucleotide, an inverted deoxynucleotide or an inverted abasic nucleotide. The overhang(s) can be on the sense strand, the antisense strand or any combination thereof. Furthermore, the nucleotide(s) of an overhang can be present on the 5′-end, 3′-end or both ends of either an antisense or sense strand of the RNAi agent. In certain embodiments, longer, extended overhangs are possible.

[0030] In some embodiments, the antisense strand is 21 nucleotides in length, and the sense strand is 19 nucleotides in length. In some embodiments, the antisense strand is 19 nucleotides in length, and the sense strand is 19 nucleotides in length.

[0031] The oligonucleotides disclosed herein may be unmodified or modified (e.g., chemically modified or conjugated). A modified oligonucleotide as disclosed herein comprises an identical nucleobase sequence as compared to a corresponding unmodified oligonucleotide, but further comprises one or more modifications as disclosed herein.

[0032] In some embodiments, the antisense strand comprises a nucleotide sequence comprising at least 15 contiguous nucleotides (for example, 15, 16, 17, 18, 19, 20, or 21 contiguous nucleotides) differing by no more than 4 nucleotides from any one of the antisense strand sequences of Tables 1A-1C. In some embodiments, the antisense strand differs by no more than 3 nucleotides from any one of the antisense strand sequences of Tables 1A-1C. In some embodiments, the antisense strand differs by no more than 2 nucleotides from any one of the antisense strand sequences of Tables 1A-1C. In some embodiments, the antisense strand differs by no more than 1 nucleotide from any one of the antisense strand sequences of Tables 1A-1C. In some embodiments, the antisense strand comprises any one of the antisense strand sequences of Tables 1A-1C. In some embodiments, the antisense strand consists of any one of the antisense strand sequences of Tables 1A-1C.

[0033] In some embodiments, the present disclosure provides oligonucleotides for inhibiting expression of PLN, wherein the oligonucleotide comprises an antisense strand substantially complementary to a sequence encoding PLN. In some embodiments, the oligonucleotide targets a sequence corresponding to positions selected from Table 4.

[0034] In some embodiments, the antisense strand comprises a nucleotide sequence comprising at least 15 contiguous nucleotides (for example, 15, 16, 17, 18, 19, 20, or 21 contiguous nucleotides) differing by no more than 4 nucleotides from the nucleotide sequence of any one of SEQ ID NOs: 629-1256 or 1885-2522. In some embodiments, the antisense strand differs by no more than 3 nucleotides from the nucleotide sequence of any one of SEQ ID NOs: 629-1256 or 1885-2522. In some embodiments, the antisense strand differs by no more than 2 nucleotides from the nucleotide sequence of any one of SEQ ID NOs: 629-1256 or 1885-2522. In some embodiments, the antisense strand differs by no more than 1 nucleotide from the nucleotide sequence of any one of SEQ ID NOs: 629-1256 or 1885-2522. In some embodiments, the antisense strand comprises the nucleotide sequence of any one of SEQ ID NOs: 629-1256 or 1885-2522. In some embodiments, the antisense strand consists of the nucleotide sequence of any one of SEQ ID NOs: 629-1256 or 1885-2522.

[0035] In some embodiments, the antisense strand comprises a nucleotide sequence comprising at least 15 contiguous nucleotides (for example, 15, 16, 17, 18, 19, 20, or 21 contiguous nucleotides) differing by no more than 4 nucleotides from the nucleotide sequence of any one of SEQ ID NOs: 2644-2763. In some embodiments, the antisense strand differs by no more than 3 nucleotides from the nucleotide sequence of any one of SEQ ID NOs: 2644-2763. In some embodiments, the antisense strand differs by no more than 2 nucleotides from the nucleotide sequence of any one of SEQ ID NOs: 2644-2763. In some embodiments, the antisense strand differs by no more than 1 nucleotide from the nucleotide sequence of any one of SEQ ID NOs: 2644-2763. In some embodiments, the antisense strand comprises the nucleotide sequence of any one of SEQ ID NOs: 2644-2763. In some embodiments, the antisense strand consists of the nucleotide sequence of any one of SEQ ID NOs: 2644-2763.

[0036] In some embodiments, the antisense strand comprises a nucleotide sequence having at least 90% nucleotide sequence identity (for example, 90%, 91%, 92%, 93%, 94%, 95%, 96%, 97%, 98%, 99%, or 100% nucleotide sequence identity) to a portion of the nucleotide sequence of any one of SEQ ID NOs: 629-1256 or 1885-2522. In some embodiments, the antisense strand comprises a nucleotide sequence having at least 90% nucleotide sequence identity (for example, 90%, 91%, 92%, 93%, 94%, 95%, 96%, 97%, 98%, 99%, or 100% nucleotide sequence identity) to a portion of the nucleotide sequence of any one of SEQ ID NOs: 2644-2763.

[0037] In some embodiments, the antisense strand comprises a nucleotide sequence having at least 90% nucleotide sequence identity (for example, 90%, 91%, 92%, 93%, 94%, 95%, 96%, 97%, 98%, 99%, or 100% nucleotide sequence identity) to the nucleotide sequence of any one of SEQ ID NOs: 629-1256 or 1885-2522. In some embodiments, the antisense strand comprises a nucleotide sequence having at least 90% nucleotide sequence identity (for example, 90%, 91%, 92%, 93%, 94%, 95%, 96%, 97%, 98%, 99%, or 100% nucleotide sequence identity) to the nucleotide sequence of any one of SEQ ID NOs: 2644-2763.

[0038] In some embodiments, the antisense strand consists of a nucleotide sequence having the nucleotide sequence of any one of SEQ ID NOs: 629-1256 or 1885-2522. In some embodiments, the antisense strand consists of a nucleotide sequence having the nucleotide sequence of any one of SEQ ID NOs: 2644-2763.

[0039] In some embodiments, the sense strand comprises a nucleotide sequence comprising at least 15 contiguous nucleotides (for example, 15, 16, 17, 18, or 19 contiguous nucleotides) differing by no more than 4 nucleotides from any one of the sense strand sequences of Tables 1A-1C. In some embodiments, the sense strand differs by no more than 3 nucleotides from any one of the sense strand sequences of Tables 1A-1C. In some embodiments, the sense strand differs by no more than 2 nucleotides from any one of the sense strand sequences of Tables 1A-1C. In some embodiments, the sense strand differs by no more than 1 nucleotide from any one of the sense strand sequences of Tables 1A-1C. In some embodiments, the sense strand comprises a sequence of any one of the sense strands of Tables 1A-1C. In some embodiments, the sense strand consists of a sequence of any one of the sense strands of Tables 1A-1C.

[0040] In some embodiments, the sense strand comprises a nucleotide sequence comprising at least 15 contiguous nucleotides (for example, 15, 16, 17, 18, or 19 contiguous nucleotides) differing by no more than 4 nucleotides from the nucleotide sequence of any one of SEQ ID NOs: 1-628 or 1257-1884. In some embodiments, the sense strand differs by no more than 3 nucleotides from the nucleotide sequence of any one of SEQ ID NOs: 1-628 or 1257-1884. In some embodiments, the sense strand differs by no more than 2 nucleotides from the nucleotide sequence of any one of SEQ ID NOs: 1-628 or 1257-1884. In some embodiments, the sense strand differs by no more than 1 nucleotide from the nucleotide sequence of any one of SEQ ID NOs: 1-628 or 1257-1884. In some embodiments, the sense strand comprises the nucleotide sequence of any one of SEQ ID NOs: 1-628 or 1257-1884. In some embodiments, the sense strand consists of the nucleotide sequence of any one of SEQ ID NOs: 1-628 or 1257-1884.

[0041] In some embodiments, the sense strand comprises a nucleotide sequence comprising at least 15 contiguous nucleotides (for example, 15, 16, 17, 18, or 19 contiguous nucleotides) differing by no more than 4 nucleotides from the nucleotide sequence of any one of SEQ ID NOs: 2524-2643. In some embodiments, the sense strand differs by no more than 3 nucleotides from the nucleotide sequence of any one of SEQ ID NOs: 2524-2643. In some embodiments, the sense strand differs by no more than 2 nucleotides from the nucleotide sequence of any one of SEQ ID NOs: 2524-2643. In some embodiments, the sense strand differs by no more than 1 nucleotide from the nucleotide sequence of any one of SEQ ID NOs: 2524-2643. In some embodiments, the sense strand comprises the nucleotide sequence of any one of SEQ ID NOs: 2524-2643. In some embodiments, the sense strand consists of the nucleotide sequence of any one of SEQ ID NOs: 2524-2643.

[0042] In some embodiments, the sense strand comprises a nucleotide sequence having at least 90% nucleotide sequence identity (for example, at least 90%, 91%, 92%, 93%, 94%, 95%, 96%, 97%, 98%, 99%, or 100% nucleotide sequence identity) to a portion of the nucleotide sequence of any one of SEQ ID NOs: 1-628 or 1257-1884. In some embodiments, the sense strand comprises a nucleotide sequence having at least 90% nucleotide sequence identity (for example, at least 90%, 91%, 92%, 93%, 94%, 95%, 96%, 97%, 98%, 99%, or 100% nucleotide sequence identity) to the nucleotide sequence of any one of SEQ ID NOs: 1-628 or 1257-1884.

[0043] In some embodiments, the sense strand comprises a nucleotide sequence having at least 90% nucleotide sequence identity (for example, at least 90%, 91%, 92%, 93%, 94%, 95%, 96%, 97%, 98%, 99%, or 100% nucleotide sequence identity) to a portion of the nucleotide sequence of any one of SEQ ID NOs: 2524-2643. In some embodiments, the sense strand comprises a nucleotide sequence having at least 90% nucleotide sequence identity (for example, at least 90%, 91%, 92%, 93%, 94%, 95%, 96%, 97%, 98%, 99%, or 100% nucleotide sequence identity) to the nucleotide sequence of any one of SEQ ID NOs: 2524-2643.

[0044] In some embodiments, the sense strand consists of a nucleotide sequence having the nucleotide sequence of any one of SEQ ID NOs: 1-628 or 1257-1884. In some embodiments, the sense strand consists of a nucleotide sequence having the nucleotide sequence of any one of SEQ ID NOs: 2524-2643.

[0045] In some embodiments, the antisense strand comprises a nucleotide sequence comprising at least 15 contiguous nucleotides (for example, 15, 16, 17, 18, 19, 20, or 21 contiguous nucleotides) differing by no more than 4 nucleotides from the nucleotide sequence of any one of SEQ ID NOs: 629-1256 or 1885-2522, and the sense strand comprises a nucleotide sequence at least 15 contiguous nucleotides (for example, 15, 16, 17, 18, or 19 contiguous nucleotides) differing by no more than 4 nucleotides from the nucleotide sequence of any one of SEQ ID NOs: 1-628 or 1257-1884.

[0046] In some embodiments, the antisense strand comprises a nucleotide sequence comprising at least 15 contiguous nucleotides (for example, 15, 16, 17, 18, 19, 20, or 21 contiguous nucleotides) differing by no more than 4 nucleotides from the nucleotide sequence of any one of SEQ ID NOs: 2644-2763, and the sense strand comprises a nucleotide sequence at least 15 contiguous nucleotides (for example, 15, 16, 17, 18, or 19 contiguous nucleotides) differing by no more than 4 nucleotides from the nucleotide sequence of any one of SEQ ID NOs: 2524-2643.

[0047] In some embodiments, the antisense strand comprises a nucleotide sequence having at least 90% nucleotide sequence identity (for example, at least 90%, 91%, 92%, 93%, 94%, 95%, 96%, 97%, 98%, 99%, or 100% nucleotide sequence identity) to a portion of the nucleotide sequence of any one of SEQ ID NOs: 629-1256 or 1885-2522, and the sense strand comprises a nucleotide sequence having at least 90% nucleotide sequence identity (for example, at least 90%, 91%, 92%, 93%, 94%, 95%, 96%, 97%, 98%, 99%, or 100% nucleotide sequence identity) to a portion of the nucleotide sequence of any one of SEQ ID NOs: 1-628 or 1257-1884.

[0048] In some embodiments, the antisense strand comprises a nucleotide sequence having at least 90% nucleotide sequence identity (for example, at least 90%, 91%, 92%, 93%, 94%, 95%, 96%, 97%, 98%, 99%, or 100% nucleotide sequence identity) to a portion of the nucleotide sequence of any one of SEQ ID NOs: 2644-2763, and the sense strand comprises a nucleotide sequence having at least 90% nucleotide sequence identity (for example, at least 90%, 91%, 92%, 93%, 94%, 95%, 96%, 97%, 98%, 99%, or 100% nucleotide sequence identity) to a portion of the nucleotide sequence of any one of SEQ ID NOs: 2524-2643.

[0049] In some embodiments, the antisense strand comprises a nucleotide sequence having at least 90% nucleotide sequence identity (for example, at least 90%, 91%, 92%, 93%, 94%, 95%, 96%, 97%, 98%, 99%, or 100% nucleotide sequence identity) to the nucleotide sequence of any one of SEQ ID NOs: 629-1256 or 1885-2522, and the sense strand comprises a nucleotide sequence having at least 90% nucleotide sequence identity (for example, at least 90%, 91%, 92%, 93%, 94%, 95%, 96%, 97%, 98%, 99%, or 100% nucleotide sequence identity) to the nucleotide sequence of any one of SEQ ID NOs: 1-628 or 1257-1884.

[0050] In some embodiments, the antisense strand comprises a nucleotide sequence having at least 90% nucleotide sequence identity (for example, at least 90%, 91%, 92%, 93%, 94%, 95%, 96%, 97%, 98%, 99%, or 100% nucleotide sequence identity) to the nucleotide sequence of any one of SEQ ID NOs: 2644-2763, and the sense strand comprises a nucleotide sequence having at least 90% nucleotide sequence identity (for example, at least 90%, 91%, 92%, 93%, 94%, 95%, 96%, 97%, 98%, 99%, or 100% nucleotide sequence identity) to the nucleotide sequence of any one of SEQ ID NOs: 2524-2643.

[0051] In some embodiments, the antisense strand consists of a nucleotide sequence of any one of SEQ ID NOs: 629-1256 or 1885-2522, and the sense strand consists of a nucleotide sequence of any one of SEQ ID NOs: 1-628 or 1257-1884.

[0052] In some embodiments, the antisense strand consists of a nucleotide sequence of any one of SEQ ID NOs: 2644-2763, and the sense strand consists of a nucleotide sequence of any one of SEQ ID NOs: 2524-2643.

[0053] In some embodiments, the oligonucleotide of the present disclosure targets a sequence of nucleotides corresponding to any one of positions 202-220, 1209-1227, 1211-1229, 1481-1499, 2424-2442, 2430-2448, 42-60, 219-237, 329-347, 330-348, 1130-1148, 1202-1220, 1503-1521, 1504-1522, 1900-1918, 1906-1924, 1939-1957, 1940-1958, 1948-1966, 2301-2319, 2309-2327, 2425-2443, 2429-2447, 2431-2449, 226-244, 227-245, 228-246, 260-278, 276-294, 667-685, 668-686, 959-977, 1099-1117, 1100-1118, 1590-1608, 2522-2540, 2576-2594, 2837-2855, 225-243, 476-494, 477-495, 484-502, 809-827, 617-635, 666-684, 669-687, 274-292, 275-293, 1098-1116, 1101-1119, 1413-1431, 1483-1501, 1484-1502, 1485-1503, 1600-1618, 1876-1894, 1933-1951, 2158-2176, 2269-2287, 2349-2367, 2856-2874, 2857-2875, 278-296, 2692-2710, 757-775, 1379-1397, 2220-2238, 2102-2120, 2690-2708, 52-70, 1380-1398, 1132-1150, 1126-1144, 281-299, 2232-2250, 2219-2237, 199-217, 2093-2111, 1378-1396, 2840-2858, 1134-1152, 2222-2240, 2703-2721, 358-376, 285-303, 2184-2202, 1377-1395, 359-377, 194-212, 888-906, 193-211, 209-227, 210-228, 211-229, 248-266, 249-267, 250-268, 251-269, 252-270, 253-271, 606-624, 607-625, 608-626, 609-627, 203-221, 204-222, 206-224, 207-225, 223-241, 230-248, 300-318, 301-319, 302-320, 303-321, 306-324, 307-325, 308-326, 309-327, 310-328, 311-329, 312-330, 314-332, 315-333, 321-339, 322-340, 323-341, 324-342, 325-343, 326-344, 327-345, 328-346, 331-349, 334-352, 335-353, 336-354, 337-355, 338-356, 349-367, 350-368, 351-369, 356-374, 360-378, 399-417, 400-418, 451-469, 470-488, 471-489, 475-493, 478-496, 480-498, 481-499, 482-500, 483-501, 683-701, 684-702, 715-733, 716-734, 717-735, 786-804, 788-806, 789-807, 810-828, 811-829, 812-830, 264-282, 521-539, 522-540, 523-541, 524-542, 525-543, 593-611, 610-628, 618-636, 623-641, 624-642, 718-736, 776-794, 777-795, 778-796, 779-797, 780-798, 813-831, 839-857, 926-944, 49-67, 54-72, 55-73, 109-127, 110-128, 113-131, 115-133, 195-213, 231-249, 232-250, 233-251, 234-252, 237-255, 240-258, 244-262, 296-314, 304-322, 305-323, 316-334, 317-335, 318-336, 319-337, 320-338, 341-359, 342-360, 347-365, 352-370, 362-380, 402-420, 446-464, 450-468, 452-470, 479-497, 528-546, 595-613, 598-616, 600-618, 601-619, 602-620, 604-622, 605-623, 671-689, 672-690, 674-692, 675-693, 676-694, 679-697, 680-698, 681-699, 682-700, 690-708, 782-800, 783-801, 784-802, 785-803, 787-805, 790-808, 791-809, 792-810, 803-821, 838-856, 848-866, 849-867, 850-868, 872-890, 873-891, 876-894, 877-895, 878-896, 882-900, 883-901, 886-904, 889-907, 950-968, 951-969, 952-970, 953-971, 978-996, 979-997, 980-998, 983-1001, 984-1002, 1066-1084, 1068-1086, 1071-1089, 1072-1090, 1073-1091, 1077-1095, 1078-1096, 1079-1097, 1082-1100, 1083-1101, 1118-1136, 1119-1137, 1121-1139, 1205-1223, 1206-1224, 1207-1225, 1208-1226, 1210-1228, 1375-1393, 1417-1435, 1418-1436, 1419-1437, 1420-1438, 1422-1440, 1424-1442, 1956-1974, 1957-1975, 1958-1976, 2025-2043, 2030-2048, 2087-2105, 2088-2106, 2094-2112, 2099-2117, 2145-2163, 2146-2164, 2147-2165, 2148-2166, 2150-2168, 2151-2169, 2152-2170, 2153-2171, 2182-2200, 2183-2201, 2188-2206, 2216-2234, 2228-2246, 2281-2299, 2282-2300, 2284-2302, 2288-2306, 2293-2311, 2295-2313, 2297-2315, 2303-2321, 2306-2324, 2307-2325, 2308-2326, 2310-2328, 2311-2329, 2315-2333, 2317-2335, 2380-2398, 2389-2407, 2390-2408, 2420-2438, 2432-2450, 2434-2452, 2437-2455, 2443-2461, 2601-2619, 2681-2699, 2697-2715, 2700-2718, 2947-2965, 17-35, 18-36, 19-37, 20-38, 21-39, 45-63, 47-65, 48-66, 91-109, 94-112, 95-113, 96-114, 97-115, 98-116, 99-117, 100-118, 101-119, 102-120, 103-121, 104-122, 105-123, 106-124, 107-125, 108-126, 111-129, 112-130, 114-132, 161-179, 163-181, 181-199, 182-200, 183-201, 184-202, 185-203, 186-204, 187-205, 188-206, 189-207, 197-215, 198-216, 200-218, 201-219, 205-223, 212-230, 213-231, 214-232, 215-233, 217-235, 221-239, 222-240, 224-242, 229-247, 254-272, 255-273, 256-274, 257-275, 290-308, 291-309, 292-310, 293-311, 297-315, 298-316, 299-317, 313-331, 346-364, 348-366, 353-371, 354-372, 355-373, 357-375, 361-379, 363-381, 381-399, 382-400, 383-401, 387-405, 388-406, 389-407, 390-408, 391-409, 392-410, 393-411, 394-412, 438-456, 440-458, 441-459, 442-460, 443-461, 449-467, 469-487, 472-490, 473-491, 474-492, 526-544, 527-545, 531-549, 532-550, 533-551, 537-555, 538-556, 628-646, 630-648, 631-649, 639-657, 640-658, 641-659, 642-660, 643-661, 644-662, 645-663, 646-664, 670-688, 673-691, 677-695, 687-705, 688-706, 689-707, 711-729, 712-730, 713-731, 714-732, 781-799, 793-811, 797-815, 800-818, 842-860, 844-862, 845-863, 846-864, 928-946, 949-967, 957-975, 958-976, 960-978, 961-979, 962-980, 963-981, 964-982, 965-983, 966-984, 967-985, 968-986, 969-987, 972-990, 981-999, 985-1003, 1022-1040, 1023-1041, 1024-1042, 1031-1049, 1032-1050, 1061-1079, 1062-1080, 1063-1081, 1064-1082, 1067-1085, 1069-1087, 1070-1088, 1074-1092, 1075-1093, 1080-1098, 1081-1099, 1084-1102, 1086-1104, 1087-1105, 1120-1138, 1122-1140, 1136-1154, 1178-1196, 1179-1197, 1231-1249, 1232-1250, 1233-1251, 1234-1252, 1235-1253, 1236-1254, 1239-1257, 1240-1258, 1266-1284, 1267-1285, 1268-1286, 1286-1304, 1287-1305, 1288-1306, 1289-1307, 1290-1308, 1291-1309, 1292-1310, 1293-1311, 1294-1312, 1295-1313, 1296-1314, 1297-1315, 1304-1322, 1312-1330, 1313-1331, 1314-1332, 1315-1333, 1366-1384, 1367-1385, 1368-1386, 1369-1387, 1370-1388, 1371-1389, 1372-1390, 1373-1391, 1412-1430, 1414-1432, 1415-1433, 1416-1434, 1421-1439, 1423-1441, 1426-1444, 1430-1448, 1431-1449, 1432-1450, 1433-1451, 1434-1452, 1435-1453, 1436-1454, 1437-1455, 1438-1456, 1439-1457, 1440-1458, 1441-1459, 1442-1460, 1466-1484, 1467-1485, 1468-1486, 1469-1487, 1498-1516, 1501-1519, 1502-1520, 1505-1523, 1506-1524, 1508-1526, 1526-1544, 1527-1545, 1528-1546, 1529-1547, 1530-1548, 1531-1549, 1532-1550, 1533-1551, 1543-1561, 1674-1692, 1675-1693, 1706-1724, 1707-1725, 1708-1726, 1711-1729, 1782-1800, 1783-1801, 1817-1835, 1822-1840, 2000-2018, 2001-2019, 2002-2020, 116-134, 261-279, 263-281, 267-285, 268-286, 534-552, 535-553, 1089-1107, 1090-1108, 1091-1109, 1092-1110, 1093-1111, 1094-1112, 1095-1113, 1096-1114, 1097-1115, 1228-1246, 1229-1247, 1614-1632, 1615-1633, 1616-1634, 1673-1691, 1701-1719, 1702-1720, 1703-1721, 1704-1722, 1784-1802, 1818-1836, and 1821-1839 of SEQ ID NO: 2523 (NM_002667.5).

[0054] In some embodiments, the antisense strand comprises a nucleotide sequence comprising at least 15 contiguous nucleotides (for example, 15, 16, 17, 18, 19, 20, or 21 contiguous nucleotides) differing by no more than 4 nucleotides (for example, 1, 2, 3, or 4 nucleotides) from an antisense strand selected from Table 1B, and the sense strand comprises a nucleotide sequence comprising at least 15 contiguous nucleotides (for example, 15, 16, 17, 18, 19, 20, or 21 contiguous nucleotides) differing by no more than 4 nucleotides (for example, 1, 2, 3, or 4 nucleotides) from a sense strand selected from Table 1B. In some embodiments, the antisense strand comprises a nucleotide sequence differing by no more than 4 nucleotides (for example, 1, 2, 3, or 4 nucleotides) from an antisense strand selected from Table 1B, and the sense strand comprises a nucleotide sequence differing by no more than 4 nucleotides (for example, 1, 2, 3, or 4 nucleotides) from a sense strand selected from Table 1B. In some embodiments, the antisense strand comprises an antisense strand selected from Table 1B, and the sense strand comprises a sense strand selected from Table 1B. In some embodiments, the antisense strand consists of an antisense strand selected from Table 1B, and the sense strand consists of a sense strand selected from Table 1B.

[0055] In some embodiments, the oligonucleotide of the present disclosure targets a sequence of nucleotides corresponding to any one of positions 470-488, 471-489, 475-493, 450-468, 452-470, 528-546, 381-399, 382-400, 383-401, and 472-490 of SEQ ID NO: 2523 (NM_002667.5).

[0056] In some embodiments, the antisense strand comprises a nucleotide sequence comprising at least 15 contiguous nucleotides (for example, 15, 16, 17, 18, 19, 20, or 21 contiguous nucleotides) differing by no more than 1, 2, 3, or 4 nucleotides from a sequence selected from SEQ ID NOs: 774, 775, 776, 843, 844, 846, 1042, 1043, 1044, and 1060. In some embodiments, the sense strand comprises a nucleotide sequence comprising at least 15 contiguous nucleotides (for example, 15, 16, 17, 18, or 19 contiguous nucleotides) differing by no more than 1, 2, 3, or 4 nucleotides from a nucleotide sequence selected from SEQ ID NOs: 146, 147, 148, 215, 216, 218, 414, 415, 416, and 432.

[0057] In some embodiments, the antisense strand comprises a nucleotide sequence comprising at least 15 contiguous nucleotides (for example, 15, 16, 17, 18, 19, 20, or 21 contiguous nucleotides) differing by no more than 4 nucleotides (for example, 1, 2, 3, or 4 nucleotides) from SEQ ID NO: 774, and the sense strand comprises a nucleotide sequence comprising at least 15 contiguous nucleotides (for example, 15, 16, 17, 18, or 19 contiguous nucleotides) differing by no more than 4 nucleotides (for example, 1, 2, 3, or 4 nucleotides) from SEQ ID NO: 146. In some embodiments, the antisense strand comprises a nucleotide sequence differing by no more than 4 nucleotides (for example, 1, 2, 3, or 4 nucleotides) from SEQ ID NO: 774, and the sense strand comprises a nucleotide sequence differing by no more than 4 nucleotides (for example, 1, 2, 3, or 4 nucleotides) from SEQ ID NO: 146. In some embodiments, the antisense strand comprises the nucleotide sequence SEQ ID NO: 774, and the sense strand comprises the nucleotide sequence SEQ ID NO: 146. In some embodiments, the antisense strand consists of the nucleotide sequence SEQ ID NO: 774, and the sense strand consists of the nucleotide sequence SEQ ID NO: 146.

[0058] In some embodiments, the antisense strand comprises a nucleotide sequence comprising at least 15 contiguous nucleotides (for example, 15, 16, 17, 18, 19, 20, or 21 contiguous nucleotides) differing by no more than 4 nucleotides (for example, 1, 2, 3, or 4 nucleotides) from SEQ ID NO: 775, and the sense strand comprises a nucleotide sequence comprising at least 15 contiguous nucleotides (for example, 15, 16, 17, 18, or 19 contiguous nucleotides) differing by no more than 4 nucleotides (for example, 1, 2, 3, or 4 nucleotides) from SEQ ID NO: 147. In some embodiments, the antisense strand comprises a nucleotide sequence differing by no more than 4 nucleotides (for example, 1, 2, 3, or 4 nucleotides) from SEQ ID NO: 775, and the sense strand comprises a nucleotide sequence differing by no more than 4 nucleotides (for example, 1, 2, 3, or 4 nucleotides) from SEQ ID NO: 147. In some embodiments, the antisense strand comprises the nucleotide sequence SEQ ID NO: 775, and the sense strand comprises the nucleotide sequence SEQ ID NO: 147. In some embodiments, the antisense strand consists of the nucleotide sequence SEQ ID NO: 775, and the sense strand consists of the nucleotide sequence SEQ ID NO: 147.

[0059] In some embodiments, the antisense strand comprises a nucleotide sequence comprising at least 15 contiguous nucleotides (for example, 15, 16, 17, 18, 19, 20, or 21 contiguous nucleotides) differing by no more than 4 nucleotides (for example, 1, 2, 3, or 4 nucleotides) from SEQ ID NO: 776, and the sense strand comprises a nucleotide sequence comprising at least 15 contiguous nucleotides (for example, 15, 16, 17, 18, or 19 contiguous nucleotides) differing by no more than 4 nucleotides (for example, 1, 2, 3, or 4 nucleotides) from SEQ ID NO: 148. In some embodiments, the antisense strand comprises a nucleotide sequence differing by no more than 4 nucleotides (for example, 1, 2, 3, or 4 nucleotides) from SEQ ID NO: 776, and the sense strand comprises a nucleotide sequence differing by no more than 4 nucleotides (for example, 1, 2, 3, or 4 nucleotides) from SEQ ID NO: 148. In some embodiments, the antisense strand comprises the nucleotide sequence SEQ ID NO: 776, and the sense strand comprises the nucleotide sequence SEQ ID NO: 148. In some embodiments, the antisense strand consists of the nucleotide sequence SEQ ID NO: 776, and the sense strand consists of the nucleotide sequence SEQ ID NO: 148.

[0060] In some embodiments, the antisense strand comprises a nucleotide sequence comprising at least 15 contiguous nucleotides (for example, 15, 16, 17, 18, 19, 20, or 21 contiguous nucleotides) differing by no more than 4 nucleotides (for example, 1, 2, 3, or 4 nucleotides) from SEQ ID NO: 843, and the sense strand comprises a nucleotide sequence comprising at least 15 contiguous nucleotides (for example, 15, 16, 17, 18, or 19 contiguous nucleotides) differing by no more than 4 nucleotides (for example, 1, 2, 3, or 4 nucleotides) from SEQ ID NO: 215. In some embodiments, the antisense strand comprises a nucleotide sequence differing by no more than 4 nucleotides (for example, 1, 2, 3, or 4 nucleotides) from SEQ ID NO: 843, and the sense strand comprises a nucleotide sequence differing by no more than 4 nucleotides (for example, 1, 2, 3, or 4 nucleotides) from SEQ ID NO: 215. In some embodiments, the antisense strand comprises the nucleotide sequence SEQ ID NO: 843, and the sense strand comprises the nucleotide sequence SEQ ID NO: 215. In some embodiments, the antisense strand consists of the nucleotide sequence SEQ ID NO: 843, and the sense strand consists of the nucleotide sequence SEQ ID NO: 215.

[0061] In some embodiments, the antisense strand comprises a nucleotide sequence comprising at least 15 contiguous nucleotides (for example, 15, 16, 17, 18, 19, 20, or 21 contiguous nucleotides) differing by no more than 4 nucleotides (for example, 1, 2, 3, or 4 nucleotides) from SEQ ID NO: 844, and the sense strand comprises a nucleotide sequence comprising at least 15 contiguous nucleotides (for example, 15, 16, 17, 18, or 19 contiguous nucleotides) differing by no more than 4 nucleotides (for example, 1, 2, 3, or 4 nucleotides) from SEQ ID NO: 216. In some embodiments, the antisense strand comprises a nucleotide sequence differing by no more than 4 nucleotides (for example, 1, 2, 3, or 4 nucleotides) from SEQ ID NO: 844, and the sense strand comprises a nucleotide sequence differing by no more than 4 nucleotides (for example, 1, 2, 3, or 4 nucleotides) from SEQ ID NO: 216. In some embodiments, the antisense strand comprises the nucleotide sequence SEQ ID NO: 844, and the sense strand comprises the nucleotide sequence SEQ ID NO: 216. In some embodiments, the antisense strand consists of the nucleotide sequence SEQ ID NO: 844, and the sense strand consists of the nucleotide sequence SEQ ID NO: 216.

[0062] In some embodiments, the antisense strand comprises a nucleotide sequence comprising at least 15 contiguous nucleotides (for example, 15, 16, 17, 18, 19, 20, or 21 contiguous nucleotides) differing by no more than 4 nucleotides (for example, 1, 2, 3, or 4 nucleotides) from SEQ ID NO: 846, and the sense strand comprises a nucleotide sequence comprising at least 15 contiguous nucleotides (for example, 15, 16, 17, 18, or 19 contiguous nucleotides) differing by no more than 4 nucleotides (for example, 1, 2, 3, or 4 nucleotides) from SEQ ID NO: 218. In some embodiments, the antisense strand comprises a nucleotide sequence differing by no more than 4 nucleotides (for example, 1, 2, 3, or 4 nucleotides) from SEQ ID NO: 846, and the sense strand comprises a nucleotide sequence differing by no more than 4 nucleotides (for example, 1, 2, 3, or 4 nucleotides) from SEQ ID NO: 218. In some embodiments, the antisense strand comprises the nucleotide sequence SEQ ID NO: 846, and the sense strand comprises the nucleotide sequence SEQ ID NO: 218. In some embodiments, the antisense strand consists of the nucleotide sequence SEQ ID NO: 846, and the sense strand consists of the nucleotide sequence SEQ ID NO: 218.

[0063] In some embodiments, the antisense strand comprises a nucleotide sequence comprising at least 15 contiguous nucleotides (for example, 15, 16, 17, 18, 19, 20, or 21 contiguous nucleotides) differing by no more than 4 nucleotides (for example, 1, 2, 3, or 4 nucleotides) from SEQ ID NO: 1042, and the sense strand comprises a nucleotide sequence comprising at least 15 contiguous nucleotides (for example, 15, 16, 17, 18, or 19 contiguous nucleotides) differing by no more than 4 nucleotides (for example, 1, 2, 3, or 4 nucleotides) from SEQ ID NO: 414. In some embodiments, the antisense strand comprises a nucleotide sequence differing by no more than 4 nucleotides (for example, 1, 2, 3, or 4 nucleotides) from SEQ ID NO: 1042, and the sense strand comprises a nucleotide sequence differing by no more than 4 nucleotides (for example, 1, 2, 3, or 4 nucleotides) from SEQ ID NO: 414. In some embodiments, the antisense strand comprises the nucleotide sequence SEQ ID NO: 1042, and the sense strand comprises the nucleotide sequence SEQ ID NO: 414. In some embodiments, the antisense strand consists of the nucleotide sequence SEQ ID NO: 1042, and the sense strand consists of the nucleotide sequence SEQ ID NO: 414.

[0064] In some embodiments, the antisense strand comprises a nucleotide sequence comprising at least 15 contiguous nucleotides (for example, 15, 16, 17, 18, 19, 20, or 21 contiguous nucleotides) differing by no more than 4 nucleotides (for example, 1, 2, 3, or 4 nucleotides) from SEQ ID NO: 1043, and the sense strand comprises a nucleotide sequence comprising at least 15 contiguous nucleotides (for example, 15, 16, 17, 18, or 19 contiguous nucleotides) differing by no more than 4 nucleotides (for example, 1, 2, 3, or 4 nucleotides) from SEQ ID NO: 415. In some embodiments, the antisense strand comprises a nucleotide sequence differing by no more than 4 nucleotides (for example, 1, 2, 3, or 4 nucleotides) from SEQ ID NO: 1043, and the sense strand comprises a nucleotide sequence differing by no more than 4 nucleotides (for example, 1, 2, 3, or 4 nucleotides) from SEQ ID NO: 415. In some embodiments, the antisense strand comprises the nucleotide sequence SEQ ID NO: 1043, and the sense strand comprises the nucleotide sequence SEQ ID NO: 415. In some embodiments, the antisense strand consists of the nucleotide sequence SEQ ID NO: 1043, and the sense strand consists of the nucleotide sequence SEQ ID NO: 415.

[0065] In some embodiments, the antisense strand comprises a nucleotide sequence comprising at least 15 contiguous nucleotides (for example, 15, 16, 17, 18, 19, 20, or 21 contiguous nucleotides) differing by no more than 4 nucleotides (for example, 1, 2, 3, or 4 nucleotides) from SEQ ID NO: 1044, and the sense strand comprises a nucleotide sequence comprising at least 15 contiguous nucleotides (for example, 15, 16, 17, 18, or 19 contiguous nucleotides) differing by no more than 4 nucleotides (for example, 1, 2, 3, or 4 nucleotides) from SEQ ID NO: 416. In some embodiments, the antisense strand comprises a nucleotide sequence differing by no more than 4 nucleotides (for example, 1, 2, 3, or 4 nucleotides) from SEQ ID NO: 1044, and the sense strand comprises a nucleotide sequence differing by no more than 4 nucleotides (for example, 1, 2, 3, or 4 nucleotides) from SEQ ID NO: 416. In some embodiments, the antisense strand comprises the nucleotide sequence SEQ ID NO: 1044, and the sense strand comprises the nucleotide sequence SEQ ID NO: 416. In some embodiments, the antisense strand consists of the nucleotide sequence SEQ ID NO: 1044, and the sense strand consists of the nucleotide sequence SEQ ID NO: 416.

[0066] In some embodiments, the antisense strand comprises a nucleotide sequence comprising at least 15 contiguous nucleotides (for example, 15, 16, 17, 18, 19, 20, or 21 contiguous nucleotides) differing by no more than 4 nucleotides (for example, 1, 2, 3, or 4 nucleotides) from SEQ ID NO: 1060, and the sense strand comprises a nucleotide sequence comprising at least 15 contiguous nucleotides (for example, 15, 16, 17, 18, or 19 contiguous nucleotides) differing by no more than 4 nucleotides (for example, 1, 2, 3, or 4 nucleotides) from SEQ ID NO: 432. In some embodiments, the antisense strand comprises a nucleotide sequence differing by no more than 4 nucleotides (for example, 1, 2, 3, or 4 nucleotides) from SEQ ID NO: 1060, and the sense strand comprises a nucleotide sequence differing by no more than 4 nucleotides (for example, 1, 2, 3, or 4 nucleotides) from SEQ ID NO: 432. In some embodiments, the antisense strand comprises the nucleotide sequence SEQ ID NO: 1060, and the sense strand comprises the nucleotide sequence SEQ ID NO: 432. In some embodiments, the antisense strand consists of the nucleotide sequence SEQ ID NO: 1060, and the sense strand consists of the nucleotide sequence SEQ ID NO: 432.

[0067] In some embodiments, the antisense strand comprises a nucleotide sequence comprising at least 15 contiguous nucleotides (for example, 15, 16, 17, 18, 19, 20, or 21 contiguous nucleotides) differing by no more than 1, 2, 3, or 4 nucleotides from a sequence selected from SEQ ID NOs: 2030, 2031, 2032, 2099, 2100, 2102, 2298, 2299, 2300, 2316, 2513, 2514, 2515, 2516, 2517, 2518, 2519, 2520, 2521, and 2522. In some embodiments, the sense strand comprises a nucleotide sequence comprising at least 15 contiguous nucleotides (for example, 15, 16, 17, 18, or 19 contiguous nucleotides) differing by no more than 1, 2, 3, or 4 nucleotides from a nucleotide sequence selected from SEQ ID NOs: 1402, 1403, 1404, 1471, 1472, 1474, 1670, 1671, 1672, and 1688. In some embodiments, the antisense strand comprises a nucleotide sequence comprising at least 15 contiguous nucleotides (for example, 15, 16, 17, 18, 19, 20, or 21 contiguous nucleotides) differing by no more than 1, 2, 3, or 4 nucleotides from a sequence selected from SEQ ID NOs: 2030, 2031, 2032, 2099, 2100, 2102, 2298, 2299, 2300, 2316, 2513, 2514, 2515, 2516, 2517, 2518, 2519, 2520, 2521, and 2522, and the sense strand comprises a nucleotide sequence comprising at least 15 contiguous nucleotides (for example, 15, 16, 17, 18, or 19 contiguous nucleotides) differing by no more than 1, 2, 3, or 4 nucleotides from a nucleotide sequence selected from SEQ ID NOs: 1402, 1403, 1404, 1471, 1472, 1474, 1670, 1671, 1672, and 1688.

[0068] In some embodiments, the antisense strand comprises a nucleotide sequence comprising at least 15 contiguous nucleotides (for example, 15, 16, 17, 18, 19, 20, or 21 contiguous nucleotides) differing by no more than 1, 2, 3, or 4 nucleotides from a sequence selected from SEQ ID NOs: 2513, 2514, 2515, 2516, 2517, 2518, 2519, 2520, 2521, and 2522. In some embodiments, the sense strand comprises a nucleotide sequence comprising at least 15 contiguous nucleotides (for example, 15, 16, 17, 18, or 19 contiguous nucleotides) differing by no more than 1, 2, 3, or 4 nucleotides from a nucleotide sequence selected from SEQ ID NOs: 1402, 1403, 1404, 1471, 1472, 1474, 1670, 1671, 1672, and 1688.

[0069] In some embodiments, the antisense strand comprises a nucleotide sequence comprising at least 15 contiguous nucleotides (for example, 15, 16, 17, 18, 19, 20, or 21 contiguous nucleotides) differing by no more than 1, 2, 3, or 4 nucleotides from a sequence selected from SEQ ID NOs: 2513, 2514, 2515, 2516, 2517, 2518, 2519, 2520, 2521, and 2522, and the sense strand comprises a nucleotide sequence comprising at least 15 contiguous nucleotides (for example, 15, 16, 17, 18, or 19 contiguous nucleotides) differing by no more than 1, 2, 3, or 4 nucleotides from a nucleotide sequence selected from SEQ ID NOs: 1402, 1403, 1404, 1471, 1472, 1474, 1670, 1671, 1672, and 1688.

[0070] In some embodiments, the antisense strand comprises a nucleotide sequence comprising at least 15 contiguous nucleotides (for example, 15, 16, 17, 18, 19, 20, or 21 contiguous nucleotides) differing by no more than 4 nucleotides (for example, 1, 2, 3, or 4 nucleotides) from SEQ ID NO: 1402, and the sense strand comprises a nucleotide sequence comprising at least 15 contiguous nucleotides (for example, 15, 16, 17, 18, or 19 contiguous nucleotides) differing by no more than 4 nucleotides (for example, 1, 2, 3, or 4 nucleotides) from SEQ ID NO: 2030. In some embodiments, the antisense strand comprises a nucleotide sequence differing by no more than 4 nucleotides (for example, 1, 2, 3, or 4 nucleotides) from SEQ ID NO: 1402, and the sense strand comprises a nucleotide sequence differing by no more than 4 nucleotides (for example, 1, 2, 3, or 4 nucleotides) from SEQ ID NO: 2030. In some embodiments, the antisense strand comprises the nucleotide sequence of SEQ ID NO: 1402, and the sense strand comprises the nucleotide sequence of SEQ ID NO: 2030. In some embodiments, the antisense strand consists of the nucleotide sequence of SEQ ID NO: 1402, and the sense strand consists of the nucleotide sequence of SEQ ID NO: 2030.

[0071] In some embodiments, the antisense strand comprises a nucleotide sequence comprising at least 15 contiguous nucleotides (for example, 15, 16, 17, 18, 19, 20, or 21 contiguous nucleotides) differing by no more than 4 nucleotides (for example, 1, 2, 3, or 4 nucleotides) from SEQ ID NO: 1403, and the sense strand comprises a nucleotide sequence comprising at least 15 contiguous nucleotides (for example, 15, 16, 17, 18, or 19 contiguous nucleotides) differing by no more than 4 nucleotides (for example, 1, 2, 3, or 4 nucleotides) from SEQ ID NO: 2031. In some embodiments, the antisense strand comprises a nucleotide sequence differing by no more than 4 nucleotides (for example, 1, 2, 3, or 4 nucleotides) from SEQ ID NO: 1403, and the sense strand comprises a nucleotide sequence differing by no more than 4 nucleotides (for example, 1, 2, 3, or 4 nucleotides) from SEQ ID NO: 2031. In some embodiments, the antisense strand comprises the nucleotide sequence of SEQ ID NO: 1403, and the sense strand comprises the nucleotide sequence of SEQ ID NO: 2031. In some embodiments, the antisense strand consists of the nucleotide sequence of SEQ ID NO: 1403, and the sense strand consists of the nucleotide sequence of SEQ ID NO: 2031.

[0072] In some embodiments, the antisense strand comprises a nucleotide sequence comprising at least 15 contiguous nucleotides (for example, 15, 16, 17, 18, 19, 20, or 21 contiguous nucleotides) differing by no more than 4 nucleotides (for example, 1, 2, 3, or 4 nucleotides) from SEQ ID NO: 1404, and the sense strand comprises a nucleotide sequence comprising at least 15 contiguous nucleotides (for example, 15, 16, 17, 18, or 19 contiguous nucleotides) differing by no more than 4 nucleotides (for example, 1, 2, 3, or 4 nucleotides) from SEQ ID NO: 2032. In some embodiments, the antisense strand comprises a nucleotide sequence differing by no more than 4 nucleotides (for example, 1, 2, 3, or 4 nucleotides) from SEQ ID NO: 1404, and the sense strand comprises a nucleotide sequence differing by no more than 4 nucleotides (for example, 1, 2, 3, or 4 nucleotides) from SEQ ID NO: 2032. In some embodiments, the antisense strand comprises the nucleotide sequence of SEQ ID NO: 1404, and the sense strand comprises the nucleotide sequence of SEQ ID NO: 2032. In some embodiments, the antisense strand consists of the nucleotide sequence of SEQ ID NO: 1404, and the sense strand consists of the nucleotide sequence of SEQ ID NO: 2032.

[0073] In some embodiments, the antisense strand comprises a nucleotide sequence comprising at least 15 contiguous nucleotides (for example, 15, 16, 17, 18, 19, 20, or 21 contiguous nucleotides) differing by no more than 4 nucleotides (for example, 1, 2, 3, or 4 nucleotides) from SEQ ID NO: 1471, and the sense strand comprises a nucleotide sequence comprising at least 15 contiguous nucleotides (for example, 15, 16, 17, 18, or 19 contiguous nucleotides) differing by no more than 4 nucleotides (for example, 1, 2, 3, or 4 nucleotides) from SEQ ID NO: 2099. In some embodiments, the antisense strand comprises a nucleotide sequence differing by no more than 4 nucleotides (for example, 1, 2, 3, or 4 nucleotides) from SEQ ID NO: 1471, and the sense strand comprises a nucleotide sequence differing by no more than 4 nucleotides (for example, 1, 2, 3, or 4 nucleotides) from SEQ ID NO: 2099. In some embodiments, the antisense strand comprises the nucleotide sequence of SEQ ID NO: 1471, and the sense strand comprises the nucleotide sequence of SEQ ID NO: 2099. In some embodiments, the antisense strand consists of the nucleotide sequence of SEQ ID NO: 1471, and the sense strand consists of the nucleotide sequence of SEQ ID NO: 2099.

[0074] In some embodiments, the antisense strand comprises a nucleotide sequence comprising at least 15 contiguous nucleotides (for example, 15, 16, 17, 18, 19, 20, or 21 contiguous nucleotides) differing by no more than 4 nucleotides (for example, 1, 2, 3, or 4 nucleotides) from SEQ ID NO: 1472, and the sense strand comprises a nucleotide sequence comprising at least 15 contiguous nucleotides (for example, 15, 16, 17, 18, or 19 contiguous nucleotides) differing by no more than 4 nucleotides (for example, 1, 2, 3, or 4 nucleotides) from SEQ ID NO: 2100. In some embodiments, the antisense strand comprises a nucleotide sequence differing by no more than 4 nucleotides (for example, 1, 2, 3, or 4 nucleotides) from SEQ ID NO: 1472, and the sense strand comprises a nucleotide sequence differing by no more than 4 nucleotides (for example, 1, 2, 3, or 4 nucleotides) from SEQ ID NO: 2100. In some embodiments, the antisense strand comprises the nucleotide sequence of SEQ ID NO: 1472, and the sense strand comprises the nucleotide sequence of SEQ ID NO: 2100. In some embodiments, the antisense strand consists of the nucleotide sequence of SEQ ID NO: 1472, and the sense strand consists of the nucleotide sequence of SEQ ID NO: 2100.

[0075] In some embodiments, the antisense strand comprises a nucleotide sequence comprising at least 15 contiguous nucleotides (for example, 15, 16, 17, 18, 19, 20, or 21 contiguous nucleotides) differing by no more than 4 nucleotides (for example, 1, 2, 3, or 4 nucleotides) from SEQ ID NO: 1474, and the sense strand comprises a nucleotide sequence comprising at least 15 contiguous nucleotides (for example, 15, 16, 17, 18, or 19 contiguous nucleotides) differing by no more than 4 nucleotides (for example, 1, 2, 3, or 4 nucleotides) from SEQ ID NO: 2102. In some embodiments, the antisense strand comprises a nucleotide sequence differing by no more than 4 nucleotides (for example, 1, 2, 3, or 4 nucleotides) from SEQ ID NO: 1474, and the sense strand comprises a nucleotide sequence differing by no more than 4 nucleotides (for example, 1, 2, 3, or 4 nucleotides) from SEQ ID NO: 2102. In some embodiments, the antisense strand comprises the nucleotide sequence of SEQ ID NO: 1474, and the sense strand comprises the nucleotide sequence of SEQ ID NO: 2102. In some embodiments, the antisense strand consists of the nucleotide sequence of SEQ ID NO: 1474, and the sense strand consists of the nucleotide sequence of SEQ ID NO: 2102.

[0076] In some embodiments, the antisense strand comprises a nucleotide sequence comprising at least 15 contiguous nucleotides (for example, 15, 16, 17, 18, 19, 20, or 21 contiguous nucleotides) differing by no more than 4 nucleotides (for example, 1, 2, 3, or 4 nucleotides) from SEQ ID NO: 1670, and the sense strand comprises a nucleotide sequence comprising at least 15 contiguous nucleotides (for example, 15, 16, 17, 18, or 19 contiguous nucleotides) differing by no more than 4 nucleotides (for example, 1, 2, 3, or 4 nucleotides) from SEQ ID NO: 2298. In some embodiments, the antisense strand comprises a nucleotide sequence differing by no more than 4 nucleotides (for example, 1, 2, 3, or 4 nucleotides) from SEQ ID NO: 1670, and the sense strand comprises a nucleotide sequence differing by no more than 4 nucleotides (for example, 1, 2, 3, or 4 nucleotides) from SEQ ID NO: 2298. In some embodiments, the antisense strand comprises the nucleotide sequence of SEQ ID NO: 1670, and the sense strand comprises the nucleotide sequence of SEQ ID NO: 2298. In some embodiments, the antisense strand consists of the nucleotide sequence of SEQ ID NO: 1670, and the sense strand consists of the nucleotide sequence of SEQ ID NO: 2298.

[0077] In some embodiments, the antisense strand comprises a nucleotide sequence comprising at least 15 contiguous nucleotides (for example, 15, 16, 17, 18, 19, 20, or 21 contiguous nucleotides) differing by no more than 4 nucleotides (for example, 1, 2, 3, or 4 nucleotides) from SEQ ID NO: 1671, and the sense strand comprises a nucleotide sequence comprising at least 15 contiguous nucleotides (for example, 15, 16, 17, 18, or 19 contiguous nucleotides) differing by no more than 4 nucleotides (for example, 1, 2, 3, or 4 nucleotides) from SEQ ID NO: 2299. In some embodiments, the antisense strand comprises a nucleotide sequence differing by no more than 4 nucleotides (for example, 1, 2, 3, or 4 nucleotides) from SEQ ID NO: 1671, and the sense strand comprises a nucleotide sequence differing by no more than 4 nucleotides (for example, 1, 2, 3, or 4 nucleotides) from SEQ ID NO: 2299. In some embodiments, the antisense strand comprises the nucleotide sequence of SEQ ID NO: 1671, and the sense strand comprises the nucleotide sequence of SEQ ID NO: 2299. In some embodiments, the antisense strand consists of the nucleotide sequence of SEQ ID NO: 1671, and the sense strand consists of the nucleotide sequence of SEQ ID NO: 2299.

[0078] In some embodiments, the antisense strand comprises a nucleotide sequence comprising at least 15 contiguous nucleotides (for example, 15, 16, 17, 18, 19, 20, or 21 contiguous nucleotides) differing by no more than 4 nucleotides (for example, 1, 2, 3, or 4 nucleotides) from SEQ ID NO: 1672, and the sense strand comprises a nucleotide sequence comprising at least 15 contiguous nucleotides (for example, 15, 16, 17, 18, or 19 contiguous nucleotides) differing by no more than 4 nucleotides (for example, 1, 2, 3, or 4 nucleotides) from SEQ ID NO: 2300. In some embodiments, the antisense strand comprises a nucleotide sequence differing by no more than 4 nucleotides (for example, 1, 2, 3, or 4 nucleotides) from SEQ ID NO: 1672, and the sense strand comprises a nucleotide sequence differing by no more than 4 nucleotides (for example, 1, 2, 3, or 4 nucleotides) from SEQ ID NO: 2300. In some embodiments, the antisense strand comprises the nucleotide sequence of SEQ ID NO: 1672, and the sense strand comprises the nucleotide sequence of SEQ ID NO: 2300. In some embodiments, the antisense strand consists of the nucleotide sequence of SEQ ID NO: 1672, and the sense strand consists of the nucleotide sequence of SEQ ID NO: 2300.

[0079] In some embodiments, the antisense strand comprises a nucleotide sequence comprising at least 15 contiguous nucleotides (for example, 15, 16, 17, 18, 19, 20, or 21 contiguous nucleotides) differing by no more than 4 nucleotides (for example, 1, 2, 3, or 4 nucleotides) from SEQ ID NO: 1688, and the sense strand comprises a nucleotide sequence comprising at least 15 contiguous nucleotides (for example, 15, 16, 17, 18, or 19 contiguous nucleotides) differing by no more than 4 nucleotides (for example, 1, 2, 3, or 4 nucleotides) from SEQ ID NO: 2316. In some embodiments, the antisense strand comprises a nucleotide sequence differing by no more than 4 nucleotides (for example, 1, 2, 3, or 4 nucleotides) from SEQ ID NO: 1688, and the sense strand comprises a nucleotide sequence differing by no more than 4 nucleotides (for example, 1, 2, 3, or 4 nucleotides) from SEQ ID NO: 2316. In some embodiments, the antisense strand comprises the nucleotide sequence of SEQ ID NO: 1688, and the sense strand comprises the nucleotide sequence of SEQ ID NO: 2316. In some embodiments, the antisense strand consists of the nucleotide sequence of SEQ ID NO: 1688, and the sense strand consists of the nucleotide sequence of SEQ ID NO: 2316.

[0080] In some embodiments, the antisense strand comprises a nucleotide sequence comprising at least 15 contiguous nucleotides (for example, 15, 16, 17, 18, 19, 20, or 21 contiguous nucleotides) differing by no more than 4 nucleotides (for example, 1, 2, 3, or 4 nucleotides) from SEQ ID NO: 2513, and the sense strand comprises a nucleotide sequence comprising at least 15 contiguous nucleotides (for example, 15, 16, 17, 18, or 19 contiguous nucleotides) differing by no more than 4 nucleotides (for example, 1, 2, 3, or 4 nucleotides) from SEQ ID NO: 1402. In some embodiments, the antisense strand comprises a nucleotide sequence differing by no more than 4 nucleotides (for example, 1, 2, 3, or 4 nucleotides) from SEQ ID NO: 2513, and the sense strand comprises a nucleotide sequence differing by no more than 4 nucleotides (for example, 1, 2, 3, or 4 nucleotides) from SEQ ID NO: 1402. In some embodiments, the antisense strand comprises the nucleotide sequence of SEQ ID NO: 2513, and the sense strand comprises the nucleotide sequence of SEQ ID NO: 1402. In some embodiments, the antisense strand consists of the nucleotide sequence of SEQ ID NO: 2513, and the sense strand consists of the nucleotide sequence of SEQ ID NO: 1402.

[0081] In some embodiments, the antisense strand comprises a nucleotide sequence comprising at least 15 contiguous nucleotides (for example, 15, 16, 17, 18, 19, 20, or 21 contiguous nucleotides) differing by no more than 4 nucleotides (for example, 1, 2, 3, or 4 nucleotides) from SEQ ID NO: 2514, and the sense strand comprises a nucleotide sequence comprising at least 15 contiguous nucleotides (for example, 15, 16, 17, 18, or 19 contiguous nucleotides) differing by no more than 4 nucleotides (for example, 1, 2, 3, or 4 nucleotides) from SEQ ID NO: 1403. In some embodiments, the antisense strand comprises a nucleotide sequence differing by no more than 4 nucleotides (for example, 1, 2, 3, or 4 nucleotides) from SEQ ID NO: 2514, and the sense strand comprises a nucleotide sequence differing by no more than 4 nucleotides (for example, 1, 2, 3, or 4 nucleotides) from SEQ ID NO: 1403. In some embodiments, the antisense strand comprises the nucleotide sequence of SEQ ID NO: 2514, and the sense strand comprises the nucleotide sequence of SEQ ID NO: 1403. In some embodiments, the antisense strand consists of the nucleotide sequence of SEQ ID NO: 2514, and the sense strand consists of the nucleotide sequence of SEQ ID NO: 1403.

[0082] In some embodiments, the antisense strand comprises a nucleotide sequence comprising at least 15 contiguous nucleotides (for example, 15, 16, 17, 18, 19, 20, or 21 contiguous nucleotides) differing by no more than 4 nucleotides (for example, 1, 2, 3, or 4 nucleotides) from SEQ ID NO: 2515, and the sense strand comprises a nucleotide sequence comprising at least 15 contiguous nucleotides (for example, 15, 16, 17, 18, or 19 contiguous nucleotides) differing by no more than 4 nucleotides (for example, 1, 2, 3, or 4 nucleotides) from SEQ ID NO: 1404. In some embodiments, the antisense strand comprises a nucleotide sequence differing by no more than 4 nucleotides (for example, 1, 2, 3, or 4 nucleotides) from SEQ ID NO: 2515, and the sense strand comprises a nucleotide sequence differing by no more than 4 nucleotides (for example, 1, 2, 3, or 4 nucleotides) from SEQ ID NO: 1404. In some embodiments, the antisense strand comprises the nucleotide sequence of SEQ ID NO: 2515, and the sense strand comprises the nucleotide sequence of SEQ ID NO: 1404. In some embodiments, the antisense strand consists of the nucleotide sequence of SEQ ID NO: 2515, and the sense strand consists of the nucleotide sequence of SEQ ID NO: 1404.

[0083] In some embodiments, the antisense strand comprises a nucleotide sequence comprising at least 15 contiguous nucleotides (for example, 15, 16, 17, 18, 19, 20, or 21 contiguous nucleotides) differing by no more than 4 nucleotides (for example, 1, 2, 3, or 4 nucleotides) from SEQ ID NO: 2516, and the sense strand comprises a nucleotide sequence comprising at least 15 contiguous nucleotides (for example, 15, 16, 17, 18, or 19 contiguous nucleotides) differing by no more than 4 nucleotides (for example, 1, 2, 3, or 4 nucleotides) from SEQ ID NO: 1471. In some embodiments, the antisense strand comprises a nucleotide sequence differing by no more than 4 nucleotides (for example, 1, 2, 3, or 4 nucleotides) from SEQ ID NO: 2516, and the sense strand comprises a nucleotide sequence differing by no more than 4 nucleotides (for example, 1, 2, 3, or 4 nucleotides) from SEQ ID NO: 1471. In some embodiments, the antisense strand comprises the nucleotide sequence of SEQ ID NO: 2516, and the sense strand comprises the nucleotide sequence of SEQ ID NO: 1471. In some embodiments, the antisense strand consists of the nucleotide sequence of SEQ ID NO: 2516, and the sense strand consists of the nucleotide sequence of SEQ ID NO: 1471.

[0084] In some embodiments, the antisense strand comprises a nucleotide sequence comprising at least 15 contiguous nucleotides (for example, 15, 16, 17, 18, 19, 20, or 21 contiguous nucleotides) differing by no more than 4 nucleotides (for example, 1, 2, 3, or 4 nucleotides) from SEQ ID NO: 2517, and the sense strand comprises a nucleotide sequence comprising at least 15 contiguous nucleotides (for example, 15, 16, 17, 18, or 19 contiguous nucleotides) differing by no more than 4 nucleotides (for example, 1, 2, 3, or 4 nucleotides) from SEQ ID NO: 1472. In some embodiments, the antisense strand comprises a nucleotide sequence differing by no more than 4 nucleotides (for example, 1, 2, 3, or 4 nucleotides) from SEQ ID NO: 2517, and the sense strand comprises a nucleotide sequence differing by no more than 4 nucleotides (for example, 1, 2, 3, or 4 nucleotides) from SEQ ID NO: 1472. In some embodiments, the antisense strand comprises the nucleotide sequence of SEQ ID NO: 2517, and the sense strand comprises the nucleotide sequence of SEQ ID NO: 1472. In some embodiments, the antisense strand consists of the nucleotide sequence of SEQ ID NO: 2517, and the sense strand consists of the nucleotide sequence of SEQ ID NO: 1472.

[0085] In some embodiments, the antisense strand comprises a nucleotide sequence comprising at least 15 contiguous nucleotides (for example, 15, 16, 17, 18, 19, 20, or 21 contiguous nucleotides) differing by no more than 4 nucleotides (for example, 1, 2, 3, or 4 nucleotides) from SEQ ID NO: 2518, and the sense strand comprises a nucleotide sequence comprising at least 15 contiguous nucleotides (for example, 15, 16, 17, 18, or 19 contiguous nucleotides) differing by no more than 4 nucleotides (for example, 1, 2, 3, or 4 nucleotides) from SEQ ID NO: 1474. In some embodiments, the antisense strand comprises a nucleotide sequence differing by no more than 4 nucleotides (for example, 1, 2, 3, or 4 nucleotides) from SEQ ID NO: 2518, and the sense strand comprises a nucleotide sequence differing by no more than 4 nucleotides (for example, 1, 2, 3, or 4 nucleotides) from SEQ ID NO: 1474. In some embodiments, the antisense strand comprises the nucleotide sequence of SEQ ID NO: 2518, and the sense strand comprises the nucleotide sequence of SEQ ID NO: 1474. In some embodiments, the antisense strand consists of the nucleotide sequence of SEQ ID NO: 2518, and the sense strand consists of the nucleotide sequence of SEQ ID NO: 1474.

[0086] In some embodiments, the antisense strand comprises a nucleotide sequence comprising at least 15 contiguous nucleotides (for example, 15, 16, 17, 18, 19, 20, or 21 contiguous nucleotides) differing by no more than 4 nucleotides (for example, 1, 2, 3, or 4 nucleotides) from SEQ ID NO: 2519, and the sense strand comprises a nucleotide sequence comprising at least 15 contiguous nucleotides (for example, 15, 16, 17, 18, or 19 contiguous nucleotides) differing by no more than 4 nucleotides (for example, 1, 2, 3, or 4 nucleotides) from SEQ ID NO: 1670. In some embodiments, the antisense strand comprises a nucleotide sequence differing by no more than 4 nucleotides (for example, 1, 2, 3, or 4 nucleotides) from SEQ ID NO: 2519, and the sense strand comprises a nucleotide sequence differing by no more than 4 nucleotides (for example, 1, 2, 3, or 4 nucleotides) from SEQ ID NO: 1670. In some embodiments, the antisense strand comprises the nucleotide sequence of SEQ ID NO: 2519, and the sense strand comprises the nucleotide sequence of SEQ ID NO: 1670. In some embodiments, the antisense strand consists of the nucleotide sequence of SEQ ID NO: 2519, and the sense strand consists of the nucleotide sequence of SEQ ID NO: 1670.

[0087] In some embodiments, the antisense strand comprises a nucleotide sequence comprising at least 15 contiguous nucleotides (for example, 15, 16, 17, 18, 19, 20, or 21 contiguous nucleotides) differing by no more than 4 nucleotides (for example, 1, 2, 3, or 4 nucleotides) from SEQ ID NO: 2520, and the sense strand comprises a nucleotide sequence comprising at least 15 contiguous nucleotides (for example, 15, 16, 17, 18, or 19 contiguous nucleotides) differing by no more than 4 nucleotides (for example, 1, 2, 3, or 4 nucleotides) from SEQ ID NO: 1671. In some embodiments, the antisense strand comprises a nucleotide sequence differing by no more than 4 nucleotides (for example, 1, 2, 3, or 4 nucleotides) from SEQ ID NO: 2520, and the sense strand comprises a nucleotide sequence differing by no more than 4 nucleotides (for example, 1, 2, 3, or 4 nucleotides) from SEQ ID NO: 1671. In some embodiments, the antisense strand comprises the nucleotide sequence of SEQ ID NO: 2520, and the sense strand comprises the nucleotide sequence of SEQ ID NO: 1671. In some embodiments, the antisense strand consists of the nucleotide sequence of SEQ ID NO: 2520, and the sense strand consists of the nucleotide sequence of SEQ ID NO: 1671.

[0088] In some embodiments, the antisense strand comprises a nucleotide sequence comprising at least 15 contiguous nucleotides (for example, 15, 16, 17, 18, 19, 20, or 21 contiguous nucleotides) differing by no more than 4 nucleotides (for example, 1, 2, 3, or 4 nucleotides) from SEQ ID NO: 2521, and the sense strand comprises a nucleotide sequence comprising at least 15 contiguous nucleotides (for example, 15, 16, 17, 18, or 19 contiguous nucleotides) differing by no more than 4 nucleotides (for example, 1, 2, 3, or 4 nucleotides) from SEQ ID NO: 1672. In some embodiments, the antisense strand comprises a nucleotide sequence differing by no more than 4 nucleotides (for example, 1, 2, 3, or 4 nucleotides) from SEQ ID NO: 2521, and the sense strand comprises a nucleotide sequence differing by no more than 4 nucleotides (for example, 1, 2, 3, or 4 nucleotides) from SEQ ID NO: 1672. In some embodiments, the antisense strand comprises the nucleotide sequence of SEQ ID NO: 2521, and the sense strand comprises the nucleotide sequence of SEQ ID NO: 1672. In some embodiments, the antisense strand consists of the nucleotide sequence of SEQ ID NO: 2521, and the sense strand consists of the nucleotide sequence of SEQ ID NO: 1672.

[0089] In some embodiments, the antisense strand comprises a nucleotide sequence comprising at least 15 contiguous nucleotides (for example, 15, 16, 17, 18, 19, 20, or 21 contiguous nucleotides) differing by no more than 4 nucleotides (for example, 1, 2, 3, or 4 nucleotides) from SEQ ID NO: 2522, and the sense strand comprises a nucleotide sequence comprising at least 15 contiguous nucleotides (for example, 15, 16, 17, 18, or 19 contiguous nucleotides) differing by no more than 4 nucleotides (for example, 1, 2, 3, or 4 nucleotides) from SEQ ID NO: 1688. In some embodiments, the antisense strand comprises a nucleotide sequence differing by no more than 4 nucleotides (for example, 1, 2, 3, or 4 nucleotides) from SEQ ID NO: 2522, and the sense strand comprises a nucleotide sequence differing by no more than 4 nucleotides (for example, 1, 2, 3, or 4 nucleotides) from SEQ ID NO: 1688. In some embodiments, the antisense strand comprises the nucleotide sequence of SEQ ID NO: 2522, and the sense strand comprises the nucleotide sequence of SEQ ID NO: 1688. In some embodiments, the antisense strand consists of the nucleotide sequence of SEQ ID NO: 2522, and the sense strand consists of the nucleotide sequence of SEQ ID NO: 1688.

[0090] A PLN RNAi agent described herein can contain one or more mismatches to the target sequence (e.g., a sequence of between 15 and 30 nucleotides in length). In some embodiments, a PLN RNAi agent as described herein contains no more than 4 mismatches (e.g., no more than 4, 3, 2, 1, or 0 mismatches to the target sequence). If the antisense strand of the RNAi agent contains mismatches to a target sequence, it may be preferable that the area of mismatch is not located in the center of the region of complementarity. If the antisense strand of the RNAi agent contains mismatches to the target sequence, it may be preferable that the mismatch be restricted to be within the last 5 nucleotides from either the 5′- or 3′-end of the region of complementarity. For example, for a 21 nucleotide RNAi agent, the strand which is complementary to a region of, e.g., PLN, generally does not contain any mismatch within the central 11 nucleotides. The methods described herein or methods known in the art can be used to determine whether an RNAi agent containing a mismatch to a target sequence is effective in inhibiting the expression of PLN. Consideration of the efficacy of RNAi agents with mismatches in inhibiting expression of a target gene is important, especially if the particular region of complementarity in a target gene is known to have polymorphic sequence variation within the population.

[0091] In some embodiments, reduction in expression levels is assayed using an RT-qPCR assay to perform relative quantification of PLN mRNA in iCell cardiomyocytes. The skilled artisan will appreciate that various approaches to quantify knockdown of PLN expression for assessing RNAi agent activity may be used in the art, including commercially available kits, e.g., from Thermo. In some embodiments, any one of the RNAi agents described herein can reduce expression levels of a PLN mRNA when assayed in cultured cells. Any suitable cells known in the art may be used to assess the RNAi agents. In some embodiments, the cultured cells are iCell cardiomyocytes. In some embodiments, administration of any one of the RNAi agents disclosed herein to a cultured cell results in a reduction in expression level of a PLN. In some embodiments, administration of the RNAi agent results in at least a 30% reduction in expression levels of the PLN mRNA. In some embodiments, administration of the RNAi agent results in at least a 35% reduction in expression levels of the PLN mRNA. In some embodiments, administration of the RNAi agent results in at least a 40% reduction in expression levels of the PLN mRNA. In some embodiments, administration of the RNAi agent results in at least a 45% reduction in expression levels of the PLN mRNA. In some embodiments, administration of the RNAi agent results in at least a 50% reduction in expression levels of the PLN mRNA. In some embodiments, administration of the RNAi agent results in at least a 55% reduction in expression levels of the PLN mRNA. In some embodiments, administration of the RNAi agent results in at least a 60% reduction in expression levels of the PLN mRNA. In some embodiments, administration of the RNAi agent results in at least a 65% reduction in expression levels of the PLN mRNA. In some embodiments, administration of the RNAi agent results in at least a 70% reduction in expression levels of the PLN mRNA. In some embodiments, administration of the RNAi agent results in at least a 75% reduction in expression levels of the PLN mRNA. In some embodiments, administration of the RNAi agent results in at least an 80% reduction in expression levels of the PLN mRNA. In some embodiments, administration of the RNAi agent results in at least an 85% reduction in expression levels of the PLN mRNA. In some embodiments, administration of the RNAi agent results in at least a 90% reduction in expression levels of the PLN mRNA. In some embodiments, administration of the RNAi agent results in at least a 95% reduction in expression levels of the PLN mRNA.

### Single-Stranded Antisense Oligonucleotides

[0092] In some embodiments, the oligonucleotide is a single-stranded antisense oligonucleotide, or “ASO.” ASOs comprise an antisense strand with at least partial complementary to a target sequence in an RNA. Upon binding to a target sequence, downregulation of the RNA may be achieved through various mechanisms, including, but not limited to, sterically blocking translation or recruitment of RNase H.

[0093] In some embodiments, the ASO comprises a nucleic acid sequence of at least 14 contiguous nucleotides (for example, 14, 15, 16, 17, 18, 19, 20, or 21 contiguous nucleotides) that differ by no more than 1, 2, 3, or 4 nucleotides from any one of SEQ ID NOs: 629-1256 or 1885-2522. In some embodiments, the ASO comprises a nucleotide sequence of any one of SEQ ID NOs: 629-1256 or 1885-2522. In some embodiments, the ASO comprises a nucleic acid sequence of at least 14 contiguous nucleotides (for example, 14, 15, 16, 17, 18, 19, 20, or 21 contiguous nucleotides) that differ by no more than 1, 2, 3, or 4 nucleotides from any one of SEQ ID NOs: 2644-2763. In some embodiments, the ASO comprises a nucleotide sequence of any one of SEQ ID NOs: 2644-2763.

[0094] In some embodiments, the single-stranded ASO comprises a nucleic acid sequence comprising at least 14, 15, 16, 17, 18, 19, 20, or 21 contiguous nucleotides that differ by no more than 1, 2, 3, or 4 nucleotides from any one of SEQ ID NOs: 2513, 2514, 2515, 2516, 2517, 2518, 2519, 2520, 2521, and 2522.

[0095] In some embodiments, the ASO comprises 2′-deoxy ribonucleotides and phosphorothioate internucleoside linkages.

[0096] In some embodiments, the ASO is a “gapmer” ASO comprising a 2′-deoxy “gap” region flanked by “wings” having nucleotides with 2′-modified ribonucleotides. In some embodiments, the ASO is an “MOE gapmer” in which the 2′-modified ribonucleotide is a 2′-O-methoxyethyl (2′-MOE or simply MOE) modification, and each of the internucleoside linkages is a phosphorothioate.

### Modified Nucleotides

[0097] The oligonucleotides disclosed herein may be modified or unmodified. In some embodiments, any one of the oligonucleotides contain one or more modifications. As used herein, a modification to a nucleotide or “modified nucleotide” refers to any nucleotide other than the canonical ribonucleotides adenine, guanine, cytosine, and uracil.

[0098] In some embodiments, the oligonucleotide comprises one or more modified nucleotides. In some embodiments, no more than 1, 2, 3, 4, or 5 of the nucleotides of the oligonucleotide are unmodified nucleotides. In some embodiments, all nucleotides of the oligonucleotide are modified nucleotides.

[0099] In some embodiments, wherein the oligonucleotide is an RNAi agent, the antisense strand comprises one or more modified nucleotides. In some embodiments, no more than 1, 2, 3, 4, or 5 of the nucleotides of the antisense strand are unmodified nucleotides. In some embodiments, all nucleotides of the antisense strand are modified nucleotides.

[0100] In some embodiments, wherein the oligonucleotide is an RNAi agent, the sense strand comprises one or more modified nucleotides. In some embodiments, no more than 1, 2, 3, 4, or 5 of the nucleotides of the sense strand are unmodified nucleotides. In some embodiments, all nucleotides of the sense strand are modified nucleotides.

[0101] Modified nucleotides include, but are not limited to 2′-modified nucleotides, 3′ to 3′ linkages (inverted) nucleotides, bridged nucleotides, 2′,3′-seco nucleotide mimics (e.g., unlocked nucleobase analogues (UNAs), locked nucleotides (LNAs), 5′-(S)-methyl-2′-deoxy-2′-fluoronucleotide (5′Me-Nf), vinyl phosphonate deoxyribonucleotides, vinyl phosphonate nucleotides, a nucleotide comprising a 5′-phosphorothioate group, a nucleotide comprising a 5′-methylphosphonate group, a nucleotide comprising a 5′ phosphate or 5′ phosphate mimic and N-(methane sulfonyl) phosphoramidate group. In some embodiments, 2′-modified nucleotides (e.g., a nucleotide with a group other than a hydroxyl group at the 2′ position of the five-membered sugar ring) include, but are not limited to, 2′-O-methyl nucleotides (represented herein as a lower case letter n in a nucleotide sequence), 2′-deoxy-2′-fluoro nucleotides (represented herein as Nf, also represented herein as 2′-fluoro nucleotide). In some embodiments, a modified nucleotide is a nucleotide comprising a 5′-methylphosphate group. In some embodiments, a modified nucleotide is a nucleotide comprising a 5′-C-methylphosphate group.

[0102] In some embodiments, modified nucleotides include, but are not limited to, deoxyribonucleotides, nucleotide mimics, abasic nucleotides, 5′ to 5′ linkages (inverted) nucleotides, non-natural base-comprising nucleotides, peptide nucleic acids (PNAs), 3′-O-methoxy (2′ internucleoside linked) nucleotides, 2′-deoxy-2′-fluoro-arabino nucleotides, cyclopropyl phosphonate nucleotides (cPrpN), vinyl phosphonate 2′-(methoxyethyl) unlocked nucleotides, a nucleotide comprising 2-hydroxymethyl-tetrahydrofurane-5-phosphate, 2′-deoxy nucleotides (represented herein as dN), 2′-methoxy ethyloxy (2′-O-(2-methoxylethyl)) nucleotides, 2′-amino nucleotides, and 2′-alkyl nucleotides. It is not necessary for all positions in a given compound to be uniformly modified. Conversely, more than one modification may be incorporated in a single oligonucleotide. Modification at one nucleotide is independent of modification at another nucleotide.

[0103] In some embodiments, the nucleotide modification comprises a deoxyribonucleotide, a 3′-terminal deoxythymidine (dT) nucleotide, an abasic nucleotide, a 2′-modified nucleotide, a 3′ to 3′ linkages (inverted) nucleotide, a 5′ to 5′ linkages (inverted) nucleotide, a non-natural base-comprising nucleotide, a nucleotide comprising a 5′-phosphorothioate group, a nucleotide comprising a 5′-methylphosphonate group, a nucleotide comprising a 5′ phosphate or 5′ phosphate mimic, a nucleotide comprising 2-hydroxymethyl-tetrahydrofurane-5-phosphate, or a nucleotide comprising a N-(methane sulfonyl) phosphoramidate group. In some embodiments, the nucleotide modification comprises a nucleotide comprising a 5′-methylphosphate group. In some embodiments, a modified nucleotide is a nucleotide comprising a 5′-C-methylphosphate group. In some embodiments, the oligonucleotide comprises a modified nucleotide selected from the group consisting of a deoxy nucleotide, a 3′-terminal deoxythymidine (dT) nucleotide, a 3′-3′ inverted nucleotide linkage, a 5′-5′ inverted nucleotide linkage, a 5′-(E)-vinylphosphonate-2′-O-methyl-uridine-3′-phosphate, a 5′-(E)-vinylphosphonate-2′-O-methyl-uridine-3′-phosphorothioate, and a combination thereof.

[0104] In some embodiments, the one or more modifications is selected from a ribose modification, a backbone modification, a nucleobase modification, or a combination thereof. In some embodiments, the one or more modifications is a combination of a ribose modification, a backbone modification, and/or a nucleobase modification.

[0105] In some embodiments, the ribose modification comprises a locked nucleic acid (LNA), a tricyclo-DNA (tcDNA), 2′-deoxy-2′-fluoro, 2′-O-methyl, 2′-methoxyethyl (2′-MOE), 2′-deoxy-2′-arabino-fluoro, 2′-O-benzyl, 2′-O-methyl-4-pyridine, 2′ cyclic ethyl (cET), phosphorodiamidate morpholino (PMO), glycol nucleic acid (GNA), unlocked nucleic acid (UNA), a threose nucleic acid (TNA), or a combination thereof. In some embodiments, the ribose modification comprises a 2′-deoxy-2′-fluoro, 2′-O-methyl, 2′-methoxyethyl (2′-MOE), glycol nucleic acid (GNA), unlocked nucleic acid (UNA), a threose nucleic acid (TNA), or a combination thereof. In some embodiments, the ribose modification comprises a 2′-deoxy-2′-fluoro, 2′-O-methyl, glycol nucleic acid (GNA), unlocked nucleic acid (UNA), a threose nucleic acid (TNA), or a combination thereof. In some embodiments, the ribose modification is 2′-deoxy-2′-fluoro modification, a 2′-O-methyl modification, or a combination thereof.

[0106] In some embodiments, the oligonucleotide comprises one or more nucleobase modifications. Nucleobase modifications include, for example, synthetic and natural nucleobases, such as 5-substituted pyrimidines, 6-azapyrimidines and N-2, N-6 and 0-6 substituted purines, (e.g., 2-aminopropyladenine, 5-propynyluracil, or 5-propynylcytosine), 5-methylcytosine (5-me-C), 5-hydroxymethyl cytosine, xanthine, hypoxanthine, 2-aminoadenine, 6-alkyl (e.g., 6-methyl, 6-ethyl, 6-isopropyl, or 6-n-butyl) derivatives of adenine and guanine, 2-alkyl (e.g., 2-methyl, 2-ethyl, 2-isopropyl, or 2-n-butyl) and other alkyl derivatives of adenine and guanine, 2-thiouracil, 2-thiothymine, 2-thiocytosine, 5-halouracil, cytosine, 5-propynyl uracil, 5-propynyl cytosine, 6-azo uracil, 6-azo cytosine, 6-azo thymine, 5-uracil (pseudouracil), 4-thiouracil, 8-halo, 8-amino, 8-sulfhydryl, 8-thioalkyl, 8-hydroxyl and other 8-substituted adenines and guanines, 5-halo (e.g., 5-bromo), 5-trifluoromethyl, and other 5-substituted uracils and cytosines, 7-methylguanine and 7-methyladenine, 8-azaguanine and 8-azaadenine, 7-deazaguanine, 7-deazaadenine, 3-deazaguanine, and 3-deazaadenine, or combinations thereof.

[0107] In some embodiments, the oligonucleotide comprises one or more backbone modification or non-standard linkages (e.g., modified internucleoside linkages). In some embodiments, a backbone modification is a non-phosphate-containing covalent internucleoside linkage. Modified internucleoside linkages or backbones include, but are not limited to, 5′-phosphorothioate groups (represented herein as a lower case “s”), chiral phosphorothioates, thiophosphates, phosphorodithioates, phosphotriesters, aminoalkyl-phosphotriesters, alkyl phosphonates (e.g., methyl phosphonates or 3′-alkylene phosphonates), chiral phosphonates, phosphinates, phosphoramidates (e.g., 3′-amino phosphoramidate, aminoalkylphosphoramidates, or thionophosphoramidates), thionoalkyl-phosphonates, thionoalkylphosphotriesters, morpholino linkages, boranophosphates having normal 3′-5′ linkages, 2′-5′ linked analogs of boranophosphates, or boranophosphates having inverted polarity wherein the adjacent pairs of nucleoside units are linked 3′-5′ to 5′-3′ or 2′-5′ to 5′-2′. In some embodiments, a modified backbone or modified internucleoside linkage lacks a phosphorus atom. Modified internucleoside linkages lacking a phosphorus atom include, but are not limited to, short chain alkyl or cycloalkyl inter-sugar linkages, mixed heteroatom and alkyl or cycloalkyl inter-sugar linkages, or one or more short chain heteroatomic or heterocyclic inter-sugar linkages. In some embodiments, modified internucleoside backbones include, but are not limited to, siloxane backbones, sulfide backbones, sulfoxide backbones, sulfone backbones, formacetyl and thioformacetyl backbones, methylene formacetyl and thioform acetyl backbones, alkene-containing backbones, sulfamate backbones, methyieneimino and methylenehydrazino backbones, sulfonate and sulfonamide backbones, amide backbones, and other backbones having mixed N, O, S, and CH₂ components.

[0108] In some embodiments, the backbone modification comprises phosphorothioate.

[0109] In some embodiments, any one of the oligonucleotides disclosed herein further comprise a sequence of 3′-terminal deoxythymidine (dT) nucleotides. In some embodiments, any one of the antisense strands described herein further comprises at least one terminal dT nucleotide. In some embodiments, any one of the antisense strands described herein further comprises 2 or more terminal dT nucleotides, e.g., 2, 3, 4, or more terminal dT nucleotides. In some embodiments, wherein the oligonucleotide is an RNAi agent, any one of the sense strands described herein further comprises at least one terminal dT nucleotide. In some embodiments, any one of the sense strands described herein further comprises 2 or more terminal dT nucleotides, e.g., 2, 3, 4, or more terminal dT nucleotides. In some embodiments, the antisense and sense strand of an RNAi agent herein each contain one or more terminal dT nucleotides.

[0110] In some embodiments, any one of the oligonucleotides disclosed herein further comprises at least one phosphorothioate internucleoside or phosphorodithioate internucleoside linkage. In some embodiments, any one of the oligonucleotides disclosed herein further comprises at least one phosphorothioate internucleoside linkage. In some embodiments, at least one phosphorothioate internucleoside linkage is at the 5′ end of the antisense strand. In some embodiments, the oligonucleotide comprises at least 2 phosphorothioate internucleoside linkages at the 5′ end of the antisense strand. In some embodiments, at least one phosphorothioate internucleoside linkage is at the 3′ end of the antisense strand. In some embodiments, the oligonucleotide comprises at least 2 phosphorothioate internucleoside linkages at the 3′ end of the antisense strand. In some embodiments, wherein the oligonucleotide is an RNAi agent, the at least one phosphorothioate internucleoside linkage is at the 5′ end of the sense strand. In some embodiments, the oligonucleotide comprises at least 2 phosphorothioate internucleoside linkages at the 5′ end of the sense strand. In some embodiments, the at least one phosphorothioate internucleoside linkage is at the 3′ end of the sense strand. In some embodiments, the oligonucleotide comprises at least 2 phosphorothioate internucleoside linkages at the 3′ end of the sense strand.

[0111] In some embodiments, any one of the oligonucleotides disclosed herein further comprises a terminal, chiral modification. In some embodiments, the terminal chiral modification is at the first internucleoside linkage at the 3′ end of the sense and/or antisense strand. In some embodiments, the terminal chiral modification is at the first and second internucleoside linkage at the 3′ end of the sense and/or antisense strand. In some embodiments, the chiral modification comprises a phosphorus atom of the internucleoside linkage being in either Rp or Sp configuration. In some embodiments, the siRNA agent further comprises a terminal, chiral modification occurring at the first internucleoside linkage at the 3′ end of the antisense strand, having the linkage phosphorus atom in Sp configuration, a terminal, chiral modification occurring at the first internucleoside linkage at the 5′ end of the antisense strand, having the linkage phosphorus atom in Rp configuration, and a terminal, chiral modification occurring at the first internucleoside linkage at the 5′ end of the sense strand, having the linkage phosphorus atom in either Rp configuration or Sp configuration. In some embodiments, the siRNA agent further comprises a terminal, chiral modification occurring at the first and second internucleoside linkages at the 3′ end of the antisense strand, having the linkage phosphorus atom in Sp configuration, a terminal, chiral modification occurring at the first internucleoside linkage at the 5′ end of the antisense strand, having the linkage phosphorus atom in Rp configuration, and a terminal, chiral modification occurring at the first internucleoside linkage at the 5′ end of the sense strand, having the linkage phosphorus atom in either Rp or Sp configuration. In some embodiments, the siRNA agent further comprises a terminal, chiral modification occurring at the first, second, and third internucleoside linkages at the 3′ end of the antisense strand, having the linkage phosphorus atom in Sp configuration, a terminal, chiral modification occurring at the first internucleoside linkage at the 5′ end of the antisense strand, having the linkage phosphorus atom in Rp configuration, and a terminal, chiral modification occurring at the first internucleoside linkage at the 5′ end of the sense strand, having the linkage phosphorus atom in either Rp or Sp configuration. In some embodiments, the siRNA agent further comprises a terminal, chiral modification occurring at the first and second internucleoside linkages at the 3′ end of the antisense strand, having the linkage phosphorus atom in Sp configuration, a terminal, chiral modification occurring at the third internucleoside linkages at the 3′ end of the antisense strand, having the linkage phosphorus atom in Rp configuration, a terminal, chiral modification occurring at the first internucleoside linkage at the 5′ end of the antisense strand, having the linkage phosphorus atom in Rp configuration, and a terminal, chiral modification occurring at the first internucleoside linkage at the 5′ end of the sense strand, having the linkage phosphorus atom in either Rp or Sp configuration. In some embodiments, the siRNA agent further comprises a terminal, chiral modification occurring at the first and second internucleoside linkages at the 3′ end of the antisense strand, having the linkage phosphorus atom in Sp configuration, a terminal, chiral modification occurring at the first and second internucleoside linkages at the 5′ end of the antisense strand, having the linkage phosphorus atom in Rp configuration, and a terminal, chiral modification occurring at the first internucleoside linkage at the 5′ end of the sense strand, having the linkage phosphorus atom in either Rp or Sp configuration.

[0112] In some embodiments, any one of the oligonucleotides disclosed herein further comprises a phosphate or phosphate mimic at the 5′-end of the antisense strand. In some embodiments, a phosphate or phosphate mimic at the 5′-end of the antisense strand is a 5′-vinyl phosphonate (VP). In some embodiments, a phosphate or phosphate mimic at the 5′-end of the antisense strand is a 5′-(E)-vinyl phosphonate (VP).

### RNAi Agent Modification Motifs

[0113] In some embodiments, any one of the antisense or sense strands disclosed herein are modified according to a modification motif or pattern.

[0114] In some embodiments, an antisense strand disclosed herein comprises a modification pattern nsNfsnnnNfnNfNfnnnnNfnNfnnnsnsn, wherein ns is a 2′-O-methyl-nucleoside-3′-phosphorothioate; Nfs is a 2′-deoxy-2′-fluoro-nucleoside-3′-phosphorothioate; n is a 2′-O-methyl-nucleoside-3′-phosphate; and Nf is a 2′-deoxy-2′-fluoro-nucleoside-3′-phosphate.

[0115] In some embodiments, an antisense strand disclosed herein comprises a modification pattern vpUsNfsnnnNfnNfNfnnnnNfnNfnnnsnsn, wherein vpUs is a 5′-vinylphosphonate-2′-O-methyl-uridine-3′-phosphorothioate; ns is a 2′-O-methyl-nucleoside-3′-phosphorothioate; Nfs is a 2′-deoxy-2′-fluoro-nucleoside-3′-phosphorothioate; n is a 2′-O-methyl-nucleoside-3′-phosphate; and Nf is a 2′-deoxy-2′-fluoro-nucleoside-3′-phosphate.

[0116] In some embodiments, a sense strand disclosed herein comprises a modification pattern nsnsnnNfnNfNfNfnnnnnnnnnn, wherein ns is a 2′-O-methyl-nucleoside-3′-phosphorothioate; n is a 2′-O-methyl-nucleoside-3′-phosphate; and Nf is a 2′-deoxy-2′-fluoro-nucleoside-3′-phosphate.

[0117] In some embodiments, a sense strand disclosed herein comprises a modification pattern NfsnsNfnNfnNfnNfnNfnNfnNfnNfnNf, wherein ns is a 2′-O-methyl-nucleoside-3′-phosphorothioate; Nfs is a 2′-deoxy-2′-fluoro-nucleoside-3′-phosphorothioate; n is a 2′-O-methyl-nucleoside-3′-phosphate; and Nf is a 2′-deoxy-2′-fluoro-nucleoside-3′-phosphate.

[0118] In some embodiments, an RNAi agent disclosed herein comprises a sense strand and an antisense strand, wherein the sense strand comprises a modification pattern nsnsnnNfnNfNfNfnnnnnnnnnn, and the antisense strand comprises a modification pattern nsNfsnnnNfnNfNfnnnnNfnNfnnnsnsn, wherein ns is a 2′-O-methyl-nucleoside-3′-phosphorothioate; Nfs is a 2′-deoxy-2′-fluoro-nucleoside-3′-phosphorothioate; n is a 2′-O-methyl-nucleoside-3′-phosphate; and Nf is a 2′-deoxy-2′-fluoro-nucleoside-3′-phosphate.

[0119] In some embodiments, an RNAi agent disclosed herein comprises a sense strand and an antisense strand, wherein the sense strand comprises a modification pattern nsnsnnNfnNfNfNfnnnnnnnnnn, and the antisense strand comprises a modification pattern vpUsNfsnnnNfnNfNfnnnnNfnNfnnnsnsn, wherein vpUs is a 5′-vinylphosphonate-2′-O-methyl-uridine-3′-phosphorothioate; ns is a 2′-O-methyl-nucleoside-3′-phosphorothioate; Nfs is a 2′-deoxy-2′-fluoro-nucleoside-3′-phosphorothioate; n is a 2′-O-methyl-nucleoside-3′-phosphate; and Nf is a 2′-deoxy-2′-fluoro-nucleoside-3′-phosphate.

[0120] In some embodiments, a strand of an RNAi agent comprises a modification pattern according to Nfsₐ(nNf)_{b}ns_{c}n, wherein n is a 2′-O-methyl-nucleoside-3′-phosphate; Nfs is a 2′-deoxy-2′-fluoro-nucleoside-3′-phosphorothioate; Nf is a 2′-deoxy-2′-fluoro-nucleoside-3′-phosphate; and ns is a 2′-O-methyl-nucleoside-3′-phosphorothioate; and wherein a is at least 1, b is at least 5-10, and c is at least 1. In some embodiments, a is at least 2, b is at least 8, and c is at least 2. In some embodiments, a is 2, b is 8, and c is 2. In some embodiments, the strand of the RNAi agent comprises the modification pattern NfsNfsnNfnNfnNfnNfnNfnNfnNfnNfnsnsn. In some embodiments, the strand is the antisense strand. In some embodiments, the antisense strand comprises the sequence of any one of SEQ ID NOs: 629-1256 or 1885-2522. In some embodiments, the antisense strand comprises the sequence of any one of SEQ ID NOs: 2644-2763. In some embodiments, the strand is the sense strand. In some embodiments, the sense strand comprises the sequence of any one of SEQ ID NOs: 1-628 or 1257-1884. In some embodiments, the sense strand comprises the sequence of any one of SEQ ID NOs: 2524-2643.

[0121] In some embodiments, a strand of an RNAi agent comprises a modification pattern according ns_{d}(Nfn)ₑNf, wherein n is a 2′-O-methyl-nucleoside-3′-phosphate; Nf is a 2′-deoxy-2′-fluoro-nucleoside-3′-phosphate; and ns is a 2′-O-methyl-nucleoside-3′-phosphorothioate; and wherein d is at least 1, and e is 5-10. In some embodiments, d is at least 2 and e is at least 8. In some embodiments, the RNAi agent comprises the modification pattern nsnsNfnNfnNfnNfnNfnNfnNfnNfnNf. In some embodiments, the strand is the sense strand. In some embodiments, the sense strand comprises the sequence of any one of SEQ ID NOs: 1-628 or 1257-1884. In some embodiments, the sense strand comprises the sequence of any one of SEQ ID NOs: 2524-2643. In some embodiments, the RNAi agent comprises the modification pattern nsnsNfnNfnNfnNfnNfnNfnNfnNfnNfnsn. In some embodiments, the strand is the antisense strand. In some embodiments, the antisense strand comprises the sequence of any one of SEQ ID NOs: 629-1256 or 1885-2522. In some embodiments, the antisense strand comprises the sequence of any one of SEQ ID NOs: 2644-2763.

[0122] In some embodiments, the antisense strand comprises a modification pattern according to Nfsₐ(nNf)_{b}ns_{c}n, wherein n is a 2′-O-methyl-nucleoside-3′-phosphate; Nfs is a 2′-deoxy-2′-fluoro-nucleoside-3′-phosphorothioate; Nf is a 2′-deoxy-2′-fluoro-nucleoside-3′-phosphate; and ns is a 2′-O-methyl-nucleoside-3′-phosphorothioate; and wherein a is at least 1, b is at least 5-10, and c is at least 1, and the sense strand comprises a modification pattern according ns_{d}(Nfn)ₑNf, wherein n is a 2′-O-methyl-nucleoside-3′-phosphate; Nf is a 2′-deoxy-2′-fluoro-nucleoside-3′-phosphate; and ns is a 2′-O-methyl-nucleoside-3′-phosphorothioate; and wherein d is at least 1, and e is 5-10. In some embodiments, the antisense strand comprises a nucleotide sequence according to any one of SEQ ID NOs: 629-1256 or 1885-2522. In some embodiments, the sense strand comprises a nucleotide sequence according to any one of SEQ ID NOs: 1-628 or 1257-1884. In some embodiments, the antisense strand comprises the sequence of any one of SEQ ID NOs: 2644-2763. In some embodiments, the sense strand comprises the sequence of any one of SEQ ID NOs: 2524-2643.

[0123] In some embodiments, the antisense strand comprises, or consists of, SEQ ID NO: 2513, and the sense strand comprises, or consists of, SEQ ID NO: 1402. In some embodiments, the antisense strand comprises, or consists of, SEQ ID NO: 2514, and the sense strand comprises, or consists of, SEQ ID NO: 1403. In some embodiments, the antisense strand comprises, or consists of, SEQ ID NO: 2515, and the sense strand comprises, or consists of, SEQ ID NO: 1404. In some embodiments, the antisense strand comprises, or consists of, SEQ ID NO: 2516, and the sense strand comprises, or consists of, SEQ ID NO: 1471. In some embodiments, the antisense strand comprises, or consists of, SEQ ID NO: 2517, and the sense strand comprises, or consists of, SEQ ID NO: 1472. In some embodiments, the antisense strand comprises, or consists of, SEQ ID NO: 2518, and the sense strand comprises, or consists of, SEQ ID NO: 1474. In some embodiments, the antisense strand comprises, or consists of, SEQ ID NO: 2519, and the sense strand comprises, or consists of, SEQ ID NO: 1670. In some embodiments, the antisense strand comprises, or consists of, SEQ ID NO: 2520, and the sense strand comprises, or consists of, SEQ ID NO: 1671. In some embodiments, the antisense strand comprises, or consists of, SEQ ID NO: 2521, and the sense strand comprises, or consists of, SEQ ID NO: 1672. In some embodiments, the antisense strand comprises, or consists of, SEQ ID NO: 2522, and the sense strand comprises, or consists of, SEQ ID NO: 1688.

[0124] In some embodiments, any one of the RNAi agents disclosed herein comprises a modification pattern wherein the antisense strand comprises the motif F(SF)nSnn, wherein n is from 2 to about 20, nn is 0 or 1, one of F and S is a 2′-deoxy-2′-fluoro modified nucleoside and the other of F and S is a 2′-O-methyl modified nucleoside. In some embodiments, each of the antisense and the sense strand is 17-23 nucleotides in length. In some embodiments, the antisense strand corresponds to the unmodified nucleobase sequence according to any one of SEQ ID NOs: 629-1256. In some embodiments, the sense strand corresponds to the unmodified nucleobase sequence according to any one of SEQ ID NOs: 1-628. In some embodiments, the antisense strand corresponds to the unmodified antisense strand in Table 1C. In some embodiments, the sense strand corresponds to the unmodified sense strand in Table 1C.

[0125] In some embodiments, any one of the RNAi agents disclosed herein comprises a modification pattern wherein the antisense strand comprises the chemical modification pattern of nNfnnnNfnNfNfnnnnNfnNfnnnnn and the sense strand comprises the chemical modification nnnnnnNfnNfNfNfnnnnnnnn, wherein n is a 2′-O-methyl-nucleoside and Nf is a 2′-deoxy-2′-fluoro-nucleoside. In some embodiments, the antisense strand corresponds to the unmodified nucleobase sequence according to any one of SEQ ID NOs: 629-1256. In some embodiments, the sense strand corresponds to the unmodified nucleobase sequence of any one according to SEQ ID NOs: 1-628. In some embodiments, the antisense strand corresponds to the unmodified antisense strand in Table 1C. In some embodiments, the sense strand corresponds to the unmodified sense strand in Table 1C.

[0126] In some embodiments, any one of the RNAi agents disclosed herein comprises a modification pattern wherein the antisense strand comprises a region having the formula X1-Y—X2, wherein Y is a subregion of from about 5 to about 12 linked nucleosides and each of X1 subregion and X2 subregion is, independently, a plurality of linked nucleosides having the formula FSFS, where one of F and S is a 2′-deoxy-2′-fluoro modified nucleoside and the other of F and S is a 2′-O-methyl modified nucleoside; and each internucleoside linkage of said X1 subregion and X2 subregion is, independently, a phosphodiester or a phosphorothioate internucleoside linkage. In some embodiments, each of the antisense and the sense strand is 20-23 nucleotides in length. In some embodiments, the antisense strand corresponds to the unmodified nucleobase sequence according to any one of SEQ ID NOs: 629-1256. In some embodiments, the sense strand corresponds to the unmodified nucleobase sequence according to any one of SEQ ID NOs: 1-628.

[0127] In some embodiments, any one of the RNAi agents disclosed herein comprises a modification pattern wherein the antisense strand comprises a contiguous sequence of linked nucleosides that define an alternating motif of the formula: 5′-Q(-L-Z-L-Q)n(-L-Z)nn-3′, wherein: each L is an internucleoside linking group; either each Q is a 2′-deoxy-2′-fluoro nucleoside and each Z is a 2′-O-methyl nucleoside; or each Q is a 2′-O-methyl nucleoside and each Z is a 2′-deoxy-2′-fluoro nucleoside; and n is from 8 to 14 and nn is 0 or 1. In some embodiments, the antisense strand corresponds to the unmodified nucleobase sequence according to any one of SEQ ID NOs: 629-1256. In some embodiments, the antisense strand corresponds to the unmodified antisense strand in Table 1C. In some embodiments, the sense strand corresponds to the unmodified sense strand in Table 1C.

[0128] In some embodiments, any one of the RNAi agents disclosed herein comprises a modification pattern wherein the antisense strand is represented by the formula:

[chemical structure]

wherein, B1′, B2′, B3′, and B4′ each independently represent a nucleotide containing a modification selected from the group consisting of 2′-O-alkyl, 2′-substituted alkoxy, 2′-substituted alkyl, 2′-halo, ENA, and BNA/LNA; T1′, T2′, and T3′ each independently represent a nucleotide comprising a chemical modification selected from the group consisting of DNA, RNA, LNA, 2′-deoxy-2′-fluoronucleotide, and 5′-(S)-methyl2′-deoxy-2′-fluoronucleotide; q1 is 4 to 15 nucleotides in length; q3 or q7 is independently 1-6 nucleotide(s) in length; q2 or q6 is independently 1-3 nucleotide(s) in length; q4 is 0-3 nucleotide(s) in length; and q5 is 0-10 nucleotide(s) in length; and wherein: the antisense strand has 2′-deoxy-2′-fluoro modifications, and wherein the 2′-deoxy-2′-fluoro modifications on the antisense strand consist of four, and only four, 2′-deoxy-2′-fluoro modifications or six, and only six, 2′-deoxy-2′-fluoro modifications. In some embodiments, the antisense strand is 19-25 nucleotides in length. In some embodiments, the antisense strand corresponds to the unmodified nucleobase sequence according to any one of SEQ ID NOs: 629-1256. In some embodiments, the sense strand corresponds to the unmodified nucleobase sequence according to any one of SEQ ID NOs: 1-628. In some embodiments, the antisense strand corresponds to the unmodified antisense strand in Table 1C. In some embodiments, the sense strand corresponds to the unmodified sense strand in Table 1C.

[0129] In some embodiments, any one of the RNAi agents disclosed herein comprises a modification pattern wherein the antisense strand and the sense strand are represented by the formula:

[chemical structure]

wherein B1, B1′, B2′, B3′, and B4′ each independently represent a nucleotide containing a modification selected from the group consisting of 2′-O-alkyl, 2′-substituted alkoxy, 2′-substituted alkyl, 2′-halo, ENA, and BNA/LNA; C1 is a thermally destabilizing nucleotide, selected from the group consisting of i) a nucleotide that forms a mismatch pair with the opposing nucleotide in the antisense strand, ii) a nucleotide having an abasic modification, and iii) a nucleotide having a sugar modification, and placed at a site opposite to the seed region (positions 2-8) of the antisense strand; T1′, T2′, and T3′ each independently represent a nucleotide comprising a modification providing the nucleotide a steric bulk that is less than or equal to the steric bulk of a 2′-OMe modification, wherein the modification is at the 2′-position of a ribose sugar of the nucleotide or at a position of a non-ribose nucleotide similar to the 2′-position of a ribose sugar; each n1, and q1 is independently 4 to 15 nucleotides in length; each q3, and q7 is independently 1-6 nucleotide(s) in length; each q2 and q6 is independently 1-3 nucleotide(s) in length; q5 is 0-10 nucleotide(s) in length; each n4, and q4 is independently 0-3 nucleotide(s) in length; n2 is 3 nucleotides in length, and T1 each are 2′-deoxy-2′-fluoronucleotides; n3 is 7 nucleotides in length, and B2 each are 2′-OMe nucleotides; and n5 is 3 nucleotides in length, and B3 each are 2′-OMe nucleotides. In some embodiments, wherein the antisense strand and sense strand are each 14 to 40 nucleotides. In some embodiments, the antisense strand corresponds to the unmodified nucleobase sequence according to any one of SEQ ID NOs: 629-1256. In some embodiments, the sense strand corresponds to the unmodified nucleobase sequence according to any one of SEQ ID NOs: 1-628. In some embodiments, the antisense strand corresponds to the unmodified antisense strand in Table 1C. In some embodiments, the sense strand corresponds to the unmodified sense strand in Table 1C.

[0130] In some embodiments, any one of the RNAi agents disclosed herein comprises a modification pattern wherein the antisense strand is represented by the formula:

[chemical structure]

wherein: B1, B2, and B3 each independently represent a nucleotide containing a modification selected from the group consisting of 2′-O-alkyl, 2′-substituted alkoxy, 2′-substituted alkyl, 2′-halo, ENA, and BNA/LNA; C1 is a thermally destabilizing nucleotide, selected from the group consisting of i) a nucleotide that forms a mismatch pair with the opposing nucleotide in the antisense strand, ii) a nucleotide having an abasic modification, and iii) a nucleotide having a sugar modification, and placed at a site opposite to the seed region (positions 2-8) of the antisense strand; T1 represents a nucleotide comprising a 2′-deoxy-2′-fluoro modification; n1 or n3 is independently 4 to 15 nucleotides in length; n5 is 1-6 nucleotide(s) in length; n2 is 3; n4 is 0-3 nucleotide(s) in length; and wherein the sense strand has 2′-deoxy-2′-fluoro modifications, and wherein the 2′-deoxy-2′-fluoro modifications on the sense strand consist of four, and only four, 2′-deoxy-2′-fluoro modifications, wherein the four 2′-deoxy-2′-fluoro modifications are at positions 7 and 9-11 from the 5′-end of the sense strand. In some embodiments, wherein the antisense strand and sense strand are each 19-25 nucleotides. In some embodiments, the antisense strand corresponds to the unmodified nucleobase sequence according to any one of SEQ ID NOs: 629-1256. In some embodiments, the sense strand corresponds to the unmodified nucleobase sequence according to any one of SEQ ID NOs: 1-628. In some embodiments, the antisense strand corresponds to the unmodified antisense strand in Table 1C. In some embodiments, the sense strand corresponds to the unmodified sense strand in Table 1C.

[0131] In some embodiments, any one of the RNAi agents disclosed herein comprises a modification pattern wherein the antisense strand is complementary to at least one portion of a mRNA of the target gene (e.g., PLN), wherein the oligonucleotide is represented by the formula:

[chemical structure]

wherein: B1′, B2′, B3′, and B4′ each independently represent a nucleotide containing a modification selected from the group consisting of 2′-O-methyl and 2′-deoxy-2′-fluoro; each B1, B2, and B3 is 2′-OMe; C1 is glycerol nucleic acid (GNA) placed at a site opposite to the seed region (positions 2-8) of the antisense strand; T1′, T2′, and T3′ are each 2′-deoxy-2′-fluoronucleotides, wherein: T1′ is at position 14 from the 5′ end of the antisense strand, and q2 is 1; and T3′ is at position 2 from the 5′ end of the antisense strand, and q6 and q7 are 1; each n1, n3, and q1 is independently 4 to 15 nucleotides in length; each n5 and q3 is independently 1-6 nucleotide(s) in length; q5 is 0-10 nucleotide(s) in length; each n4 and q4 is independently 0-3 nucleotide(s) in length; n2 is 3 nucleotides in length, and T1 each are 2′-deoxy-2′-fluoro nucleotides, and wherein (a) the oligonucleotide is covalently conjugated to at least one ligand; and (b) one of the T1 nucleotides is at position 11 from the 5′ end of the sense strand. In some embodiments, the sense strand comprises 19-22 nucleotides and the antisense strand comprises 19-25 nucleotides. In some embodiments, the antisense strand corresponds to the unmodified nucleobase sequence according to any one of SEQ ID NOs: 629-1256. In some embodiments, the sense strand corresponds to the unmodified nucleobase sequence according to any one of SEQ ID NOs: 1-628. In some embodiments, the antisense strand corresponds to the unmodified antisense strand in Table 1C. In some embodiments, the sense strand corresponds to the unmodified sense strand in Table 1C.

[0132] In some embodiments, any one of the RNAi agents disclosed herein comprises a modification pattern wherein the oligonucleotide is represented by the formula:

[chemical structure]

wherein B1′, B2′, B3′, and B4′ each independently represent a nucleotide containing a modification selected from the group consisting of 2′-O-methyl and 2′-deoxy-2′-fluoro; each B1, B2, and B3 is 2′-Ome nucleotides; C1 is glycerol nucleic acid (GNA) placed at a site opposite to the seed region (positions 2-8) of the antisense strand; T1′, T2′, and T3′ are each 2′-deoxy-2′-fluoro nucleotides, wherein: T1′ is at position 14 from the 5′ end of the antisense strand, and q2 is 1; and T3′ is at position 2 from the 5′ end of the antisense strand, and q6 and q7 are 1; each n1, n3, and q1 is independently 4 to 15 nucleotides in length; each n5 and q3 is independently 1-6 nucleotide(s) in length; q5 is 0-10 nucleotide(s) in length; each n4 and q4 is independently 0-3 nucleotide(s) in length; n2 is 3 nucleotides in length, and T1 each are 2′-deoxy-2′-fluoro nucleotides, and wherein (a) the oligonucleotide is covalently conjugated to at least one ligand; and (b) one of the T1 nucleotides is at a position in the sense strand that is opposite to position 11 from the 5′ end of the antisense strand; and (c) the oligonucleotide comprises at least one phosphorothioate internucleoside linkage. In some embodiments, the sense strand comprises 19-22 nucleotides and the antisense strand comprises 19-25 nucleotides. In some embodiments, the antisense strand corresponds to the unmodified nucleobase sequence according to any one of SEQ ID NOs: 629-1256. In some embodiments, the sense strand corresponds to the unmodified nucleobase sequence according to any one of SEQ ID NOs: 1-628. In some embodiments, the antisense strand corresponds to the unmodified antisense strand in Table 1C. In some embodiments, the sense strand corresponds to the unmodified sense strand in Table 1C.

[0133] In some embodiments, any one of the RNAi agents disclosed herein comprises a modification pattern wherein the antisense strand has sufficient complementarity to a target sequence to mediate RNA interference, wherein said sense strand comprises at least one thermally destabilizing modification of the duplex within the first 9 nucleotide positions of the 5′ region of the antisense strand or a precursor thereof, wherein the antisense strand further comprises one or both of the following characteristics: (i) 2, 3, 4, 5 or 6 2′-deoxy-2′-fluoro modifications; and (ii) 1, 2, 3, 4 or 5 phosphorothioate internucleoside linkages; and said sense strand comprises one or both of the following characteristics: (iii) 2, 3, 4, or 5 2′-deoxy-2′-fluoro modifications; and (iv) 1, 2, 3, 4 or 5 phosphorothioate internucleoside linkages. In some embodiments, the antisense strand and sense strand are each 14 to 40 nucleotides. In some embodiments, the antisense strand corresponds to the unmodified nucleobase sequence according to any one of SEQ ID NOs: 629-1256. In some embodiments, the sense strand corresponds to the unmodified nucleobase sequence according to any one of SEQ ID NOs: 1-628. In some embodiments, the antisense strand corresponds to the unmodified antisense strand in Table 1C. In some embodiments, the sense strand corresponds to the unmodified sense strand in Table 1C.

### Synthesis, Purification, and Analysis of the Oligonucleotides Described Herein

[0134] Oligomer synthesis of modified and unmodified nucleosides and nucleotides can be routinely performed according to literature procedures for DNA (Protocols for Oligonucleotides and Analogs, Ed. Agrawal (1993), Humana Press) and/or RNA (Scaringe, Methods (2001), 23, 206-217. Gait et al., Applications of Chemically synthesized RNA in RNA: Protein Interactions, Ed. Smith (1998), 1-36. Gallo et al., Tetrahedron (2001), 57, 5707-5713). The oligonucleotides provided herein can be conveniently and routinely made through the well-known technique of solid phase synthesis. Equipment for such synthesis is sold by several vendors including, for example, LGC (Alexandria, MN). Any other means for such synthesis known in the art may additionally or alternatively be employed. It is well known to use similar techniques to prepare oligonucleotides such as the phosphorothioates and alkylated derivatives. Methods of purification and analysis of oligomeric compounds are known to those skilled in the art. Analysis methods include capillary electrophoresis (CE), reverse-phase high performance liquid chromatography (RP-HPLC), and electrospray-mass spectroscopy (ESI-MS). Such synthesis and analysis methods can be performed in multi-well plates. The oligonucleotides of the invention can be prepared using solution-phase or solid-phase organic synthesis, or enzymatically by methods known in the art. Organic synthesis offers the advantage that the oligomeric strands comprising non-natural or modified nucleotides can be easily prepared. Any other means for such synthesis known in the art can additionally or alternatively be employed. It is also known to use similar techniques to prepare other oligonucleotides, such as those comprising phosphorothioates, phosphorodithioates and alkylated derivatives of internucleoside linkages. The double-stranded oligonucleotides of the invention can be prepared using a two-step procedure. First, the individual strands of the double-stranded oligonucleotides are prepared separately. Then, the component strands are annealed. Regardless of the method of synthesis, the oligonucleotides can be prepared in a solution (e.g., an aqueous and/or organic solution) that is appropriate for formulation. For example, the oligonucleotides preparation can be precipitated and redissolved in pure double-distilled water, and lyophilized. The dried oligonucleotides can then be resuspended in a solution appropriate for the intended formulation process. Teachings regarding the synthesis of particular modified oligonucleotides can be found in the following U.S. patents or pending patent applications: U.S. Pat. Nos. 5,138,045 and 5,218,105, drawn to polyamine conjugated oligonucleotides; U.S. Pat. No. 5,212,295, drawn to monomers for the preparation of oligonucleotides having chiral phosphorus linkages; U.S. Pat. Nos. 5,378,825 and 5,541,307, drawn to oligonucleotides having modified backbones; U.S. Pat. No. 5,386,023, drawn to backbone-modified oligonucleotides and the preparation thereof through reductive coupling; U.S. Pat. No. 5,457,191, drawn to modified nucleobases based on the 3-deazapurine ring system and methods of synthesis thereof, U.S. Pat. No. 5,459,255, drawn to modified nucleobases based on N-2 substituted purines; U.S. Pat. No. 5,521,302, drawn to processes for preparing oligonucleotides having chiral phosphorus linkages; U.S. Pat. No. 5,539,082, drawn to peptide nucleic acids; U.S. Pat. No. 5,554,746, drawn to oligonucleotides having beta-lactam backbones; U.S. Pat. No. 5,571,902, drawn to methods and materials for the synthesis of oligonucleotides; U.S. Pat. No. 5,578,718, drawn to nucleosides having alkylthio groups, wherein such groups can be used as linkers to other moieties attached at any of a variety of positions of the nucleoside; U.S. Pat. Nos. 5,587,361 and 5,599,797, drawn to oligonucleotides having phosphorothioate linkages of high chiral purity; U.S. Pat. No. 5,506,351, drawn to processes for the preparation of 2′-O-alkyl guanosine and related compounds, including 2,6-diaminopurine compounds; U.S. Pat. No. 5,587,469, drawn to oligonucleotides having N-2 substituted purines; U.S. Pat. No. 5,587,470, drawn to oligonucleotides having 3-deazapurines; U.S. Pat. Nos. 5,223,168, and 5,608,046, both drawn to conjugated 4′-desmethyl nucleoside analogs; U.S. Pat. Nos. 5,602,240, and 5,610,289, drawn to backbone-modified oligonucleotide analogs; and U.S. Pat. Nos. 6,262,241, and 5,459,255, drawn to, inter alia, methods of synthesizing 2′-deoxy-2′-fluoro-oligonucleotides. In some embodiments, the oligonucleotides described herein are chemically synthesized using phosphoramidite approach, e.g., the method by Roy et al. Molecules. 2013; 18(11):14268-14284; Hayakawa et al. Journal of the American Chemical Society. 1998; 120(48):12395-401; Beaucage, S. L. (1993). Oligodeoxyribonucleotides synthesis: Phosphoramidite approach. In Protocols for Oligonucleotides and Analogs: Synthesis and Properties (pp. 33-61). Humana Press, each of which is hereby incorporated by reference.

### Pharmaceutical Compositions

[0135] The present disclosure also includes pharmaceutical compositions and formulations comprising the oligonucleotides (e.g., an RNAi agent or ASO) described herein, or a pharmaceutically acceptable salt thereof. In one embodiment, provided herein are pharmaceutical compositions comprising an oligonucleotide (e.g., an RNAi agent or ASO), as described herein, or a pharmaceutically acceptable salt thereof, and a pharmaceutically acceptable carrier or excipient. The pharmaceutical compositions comprising the oligonucleotides described herein are useful for treating or preventing a condition or symptoms associated with PLN expression. Such pharmaceutical compositions are formulated based on the mode of delivery. One example is compositions that are formulated for systemic administration via parenteral delivery, e.g., by subcutaneous (SC), intramuscular (IM), or intravenous (IV) delivery. In some embodiments, an oligonucleotide is formulated in buffer solutions such as phosphate-buffered saline solutions, liposomes, micellar structures, and capsids. In some embodiments, naked oligonucleotides or conjugates thereof are formulated in water or in an aqueous solution (e.g., water with pH adjustments). In some embodiments, naked oligonucleotides or conjugates thereof are formulated in basic buffered aqueous solutions (e.g., PBS). The pharmaceutical compositions of the invention may be administered in dosages sufficient to inhibit expression of the target gene.

[0136] A “pharmaceutically acceptable carrier or excipient” is a pharmaceutically acceptable solvent, suspending agent, or any other pharmacologically inert vehicle for delivering one or more oligonucleotides to a subject. The excipient can be liquid or solid and is selected, with the planned manner of administration in mind, so as to provide for the desired bulk, consistency, etc., when combined with the oligonucleotide and the other components of a given pharmaceutical composition. Typical pharmaceutical carriers include, but are not limited to, binding agents (e.g., pregelatinized maize starch, polyvinylpyrrolidone or hydroxypropyl methylcellulose, etc.); fillers (e.g., lactose and other sugars, microcrystalline cellulose, pectin, gelatin, calcium sulfate, ethyl cellulose, polyacrylates or calcium hydrogen phosphate, etc.); lubricants (e.g., magnesium stearate, talc, silica, colloidal silicon dioxide, stearic acid, metallic stearates, hydrogenated vegetable oils, com starch, polyethylene glycols, sodium benzoate, sodium acetate, etc.); disintegrants (e.g., starch, sodium starch glycolate, etc.); and wetting agents (e.g., sodium lauryl sulphate, etc.).

[0137] In some embodiments, the present disclosure also includes a pharmaceutical composition suitable for injectable use, which comprises sterile aqueous solutions (where water soluble) or dispersions and sterile powders for the extemporaneous preparation of sterile injectable solutions or dispersions. For intravenous or subcutaneous administration, suitable carriers include physiological saline, bacteriostatic water, Cremophor EL® (BASF, Parsippany, N.J.) or phosphate buffered saline (PBS). The carrier can be a solvent or dispersion medium containing, for example, water, ethanol, polyol (for example, glycerol, propylene glycol, and liquid polyethylene glycol, and the like), and suitable mixtures thereof. In many cases, it will be preferable to include isotonic agents, for example, sugars, polyalcohols such as mannitol, sorbitol, and sodium chloride in the composition. Sterile injectable solutions can be prepared by incorporating the oligonucleotides in a required amount in a selected solvent with one or a combination of ingredients enumerated above, as required, followed by filtered sterilization.

[0138] Formulations for topical administration of oligonucleotides can include sterile and non-sterile aqueous solutions, non-aqueous solutions in common solvents such as alcohols, or solutions of the oligonucleotides in liquid or solid oil bases. The solutions can also contain buffers, diluents and other suitable additives. Pharmaceutically acceptable organic or inorganic excipients suitable for non-parenteral administration which do not deleteriously react with nucleic acids can also be used to formulate the compositions of the present disclosure. Suitable pharmaceutically acceptable carriers include, but are not limited to, water, salt solutions, alcohols, polyethylene glycols, gelatin, lactose, amylose, magnesium stearate, talc, silicic acid, viscous paraffin, hydroxymethylcellulose, polyvinylpyrrolidone and the like.

[0139] In some embodiments, the oligonucleotides herein are conjugated to one or more non-nucleotide groups including, but not limited to, a targeting group/targeting moiety, linking group, delivery polymer, or a delivery vehicle. The non-nucleotide group can enhance targeting, delivery, or attachment of the oligonucleotide.

[0140] In some embodiments, at least one nucleotide of the oligonucleotide herein is conjugated to one or more targeting ligands, such as a carbohydrate, amino sugar, cholesterol, polypeptide, or lipid. Exemplary targeting ligands include, but are not limited to, thyrotropin, melanotropin, lectin, a glycoprotein, surfactant protein A, mucin carbohydrate, a multivalent lactose moiety, a multivalent galactose moiety, a N-acetylgalactosamine (GalNAc) moiety, a N-acetyl-glucosamine moiety, a multivalent mannose moiety, a multivalent fucose moiety, a glycosylated polypeptide, transferrin or an antibody, antibody fragment, protein, peptide, or aptamer capable of binding the transferrin receptor, bisphosphonate, polyglutamate, polyaspartate, cholesterol, bile acid, folate, vitamin B12, biotin, an RGD peptide, or an RGD peptide mimetic. In some embodiments, the targeting ligand comprises a N-acetylgalactosamine (GalNAc) moiety. In some embodiments, the GalNAc moiety comprises a monovalent GalNAc moiety, a bivalent GalNAc moiety, a trivalent GalNAc moiety, or a tetravalent GalNAc moiety.

[0141] The non-nucleotide group can be covalently linked to the 3′ and/or 5′ end of either the antisense strand and/or the sense strand, when present. In some embodiments, when the oligonucleotide is an RNAi agent, the RNAi agent contains a non-nucleotide group linked to the 3′ and/or 5′ end of the sense strand. In some embodiments, a non-nucleotide group is linked to the 5′ end of a PLN RNAi agent sense strand. A non-nucleotide group may be linked directly or indirectly to the oligonucleotide via a linker/linking group. In some embodiments, a non-nucleotide group is linked to the oligonucleotide via a labile, cleavable, or reversible bond or linker.

[0142] In some embodiments, the targeting moiety is a targeting ligand. In some embodiments, the targeting ligand is small molecule-based, sugar-based (e.g., saccharide-based), fatty acid-based, protein-based, or nucleic acid-based targeting ligand. In some embodiments, the targeting moiety is a protein-based targeting ligand. In some embodiments, the protein-based targeting ligand is an antibody, nanobody, affibody, a peptibody, or a peptide. In some embodiments, the protein-based targeting ligand is an antibody, a functional fragment thereof, or an antigen-binding fragment thereof.

[0143] Various formulations have been developed to facilitate oligonucleotide use. For example, oligonucleotides can be delivered to a subject or a cellular environment using a formulation that minimizes degradation, facilitates delivery and/or uptake, or provides another beneficial property to the oligonucleotides in the formulation. In some embodiments, an oligonucleotide herein is formulated in buffer solutions such as phosphate buffered saline solutions, liposomes, micellar structures and capsids. Formulations of oligonucleotides with cationic lipids can be used to facilitate transfection of the oligonucleotides into cells. For example, cationic lipids, such as lipofectin, cationic glycerol derivatives, and polycationic molecules (e.g., polylysine), can be used. Suitable lipids include Oligofectamine, Lipofectamine (Life Technologies), NC388 (Ribozyme Pharmaceuticals, Inc., Boulder, Colo.), or FuGene 6 (Roche), all of which can be used according to the manufacturer's instructions. Accordingly, in some embodiments, a formulation herein comprises a lipid nanoparticle. In some embodiments, an excipient comprises a liposome, a lipid, a lipid complex, a microsphere, a microparticle, a nanosphere or a nanoparticle, or may be otherwise formulated for administration to the cells, tissues, organs, or body of a subject in need thereof (see, e.g., Remington: THE SCIENCE AND PRACTICE OF PHARMACY, 22nd edition, Pharmaceutical Press, 2013). In some embodiments, the formulations herein comprise an excipient. In some embodiments, an excipient confers to a composition improved stability, improved absorption, improved solubility and/or therapeutic enhancement of the active ingredient. In some embodiments, an excipient is a buffering agent (e.g., sodium citrate, sodium phosphate, a tris base, or sodium hydroxide) or a vehicle (e.g., a buffered solution, petrolatum, dimethylsulfoxide or mineral oil). In some embodiments, an oligonucleotide is lyophilized for extending its shelf-life and then made into a solution before use (e.g., administration to a subject). Accordingly, an excipient in a composition comprising any one of the oligonucleotides described herein may be a lyoprotectant (e.g., mannitol, lactose, polyethylene glycol or polyvinylpyrrolidone) or a collapse temperature modifier (e.g., dextran, Ficoll® or gelatin).

### Methods of Treatment

[0144] The present disclosure also provides methods of using any one of the oligonucleotides disclosed herein, or a pharmaceutically acceptable salt thereof, or any one of the pharmaceutical compositions as described herein to reduce or inhibit PLN expression in a subject. The methods include contacting one or more cells in a subject with an oligonucleotide of the disclosure, or a pharmaceutically acceptable salt thereof, or any one of the pharmaceutical compositions as described herein, thereby inhibiting expression of PLN in the cells. The present disclosure also provides use of any one of the oligonucleotides disclosed herein, or a pharmaceutically acceptable salt thereof, or any one of the pharmaceutical compositions as described herein, in the manufacture of a medicament for reducing or inhibiting PLN expression in a subject, or for preventing or treating a PLN related disorder in a subject. In some embodiments, the terms “inhibiting PLN expression” and “reducing PLN expression” are interchangeable.

[0145] Reduction in PLN expression can be assessed by any methods known in the art. For example, a reduction in the expression of PLN may be determined by determining the mRNA expression level of PLN using methods routine to one of ordinary skill in the art, e.g., northern blotting, qRT-PCR; by determining the protein level of PLN using methods routine to one of ordinary skill in the art, such as western blotting, immunological techniques. In some embodiments, the reduction of PLN expression is determined by measuring PLN expression in a population of cardiomyocytes or muscle cells derived from the subject. In some embodiments, the reduction of PLN expression is determined by measuring PLN expression in serum derived from the subject.

[0146] The present disclosure further provides methods of treatment of a subject in need thereof. The methods of treatment include administering an oligonucleotide of the disclosure to a subject, e.g., a subject that would benefit from inhibition of PLN expression, in a therapeutically effective amount of an oligonucleotide targeting a PLN gene or a pharmaceutical composition comprising an oligonucleotide targeting a PLN gene. In some embodiments, a method of the present disclosure comprises administering an oligonucleotide of the disclosure to a subject that would benefit from or that suffers from a disease or disorder related to abnormal SERCA2A expression or activity (for example, underexpression or hypoactivity relative to a healthy subject).

[0147] The in vivo methods of the disclosure may include administering to a subject a composition containing an oligonucleotide disclosed herein, or a pharmaceutically acceptable salt, wherein the oligonucleotide includes a nucleotide sequence that is complementary to at least a part of a sequence of nucleotides encoding PLN of the subject to be treated.

[0148] The oligonucleotide can be administered by any means known in the art including, but not limited to oral, intraperitoneal, or parenteral routes, including intracranial (e.g., intraventricular, intraparenchymal, and intrathecal), intravenous, intramuscular, intravitreal, subcutaneous, transdermal, airway (aerosol), nasal, rectal, and topical (including buccal and sublingual) administration. In certain embodiments, the compositions are administered by intravenous infusion or injection. In certain embodiments, the compositions are administered by subcutaneous injection. In certain embodiments, the compositions are administered by intrathecal injection. The administration of the oligonucleotide may be repeated over a period of time. The administration may be repeated on a regular basis. In some embodiments, after an initial treatment regimen, the treatments can be administered on a less frequent basis. A repeat-dose regimen may include administration of a therapeutic amount of an oligonucleotide on a regular basis.

[0149] The present disclosure also provides methods of using any one of the oligonucleotides disclosed herein, or a pharmaceutically acceptable salt thereof, to treat or prevent a PLN-related disorder in a subject.

[0150] The present disclosure also provides methods of using any one of the oligonucleotides disclosed herein, or a pharmaceutically acceptable salt thereof, or a pharmaceutical composition comprising the oligonucleotides described herein, to treat or prevent a PLN-related disorder in a subject. The present disclosure also provides a method for inhibiting PLN expression or treating a PLN related disorder in a subject, the method comprising administering to the subject an effective amount of an oligonucleotide for inhibiting expression of PLN, or a pharmaceutically acceptable salt thereof, or a pharmaceutical composition comprising the oligonucleotide for inhibiting expression of PLN. Non-limiting examples of PLN related disorders include inherited human dilated cardiomyopathy, familial hypertrophic cardiomyopathy, heart failure, PLN-R14Del heart disease, heart disease associated with a gain-of-function mutation in PLN, inherited dilated cardiomyopathy associated with a PLN mutation (e.g., a mutation that results in protein aggregation and/or unfolded protein response), heart failure with reduced ejection fraction (e.g., non-familial form of heart failure with reduced ejection fraction), arrhythmia, cardiomyopathy, and cardiomyopathy with heart failure.

[0151] In some embodiments, the present disclosure provides a method of treating inherited human dilated cardiomyopathy, comprising administering an oligonucleotide disclosed herein, or a pharmaceutically acceptable salt thereof, to a subject in need thereof.

[0152] In some embodiments, the present disclosure provides a method of treating familial hypertrophic cardiomyopathy, comprising administering an oligonucleotide disclosed herein, or a pharmaceutically acceptable salt thereof, to a subject in need thereof.

[0153] In some embodiments, the present disclosure provides a method of treating heart failure, comprising administering an oligonucleotide disclosed herein, or a pharmaceutically acceptable salt thereof, to a subject in need thereof.

[0154] In some embodiments, the present disclosure provides a method of treating heart failure with reduced ejection fraction (e.g., non-familial form of heart failure with reduced ejection fraction), comprising administering an oligonucleotide disclosed herein, or a pharmaceutically acceptable salt thereof, to a subject in need thereof.

[0155] In some embodiments, the present disclosure provides a method of treating arrhythmia, comprising administering an oligonucleotide disclosed herein, or a pharmaceutically acceptable salt thereof, to a subject in need thereof.

[0156] In some embodiments, the present disclosure provides a method of treating cardiomyopathy, comprising administering an oligonucleotide disclosed herein, or a pharmaceutically acceptable salt thereof, to a subject in need thereof.

[0157] In some embodiments, the present disclosure provides a method of treating cardiomyopathy with heart failure, comprising administering an oligonucleotide disclosed herein, or a pharmaceutically acceptable salt thereof, to a subject in need thereof.

[0158] In some embodiments, the present disclosure provides a method of treating PLN-R14Del heart disease, comprising administering an oligonucleotide disclosed herein, or a pharmaceutically acceptable salt thereof, to a subject in need thereof.

[0159] In some embodiments, the present disclosure provides a method of treating heart disease associated with a gain-of-function mutation in PLN, comprising administering an oligonucleotide disclosed herein, or a pharmaceutically acceptable salt thereof, to a subject in need thereof.

[0160] In some embodiments, the present disclosure provides a method of treating inherited dilated cardiomyopathy associated with a PLN mutation (e.g., a mutation that results in protein aggregation and/or unfolded protein response), comprising administering an oligonucleotide disclosed herein, or a pharmaceutically acceptable salt thereof, to a subject in need thereof.

[0161] An oligonucleotide of the disclosure may be administered as a “free oligonucleotide.” A free oligonucleotide is administered in the absence of a pharmaceutical composition. In some embodiments, a free oligonucleotide is administered in the absence of a transfection agent. The naked oligonucleotide may be in a suitable buffer solution. The buffer solution may comprise acetate, citrate, prolamine, carbonate, or phosphate, or any combination thereof. In one embodiment, the buffer solution is phosphate buffered saline (PBS). The pH and osmolarity of the buffer solution containing the oligonucleotide can be adjusted such that it is suitable for administering to a subject. Alternatively, an RNAi agent of the disclosure may be administered as a pharmaceutical composition, such as a dsRNA liposomal formulation.

[0162] In some embodiments, the methods herein may further comprise administering to the subject an additional agent or therapy suitable for treatment or prevention of a PLN related disorder. Non-limiting examples of an additional agent or therapy include anti-PLN antibodies.

### EXEMPLARY EMBODIMENTS

[0163] Embodiment 1: An oligonucleotide for inhibiting expression of phospholamban (PLN), wherein the oligonucleotide comprises an antisense strand comprising at least 14 contiguous nucleotides substantially complementary to a sequence of nucleotides encoding PLN, with no more than 4 mismatched nucleotides.

[0164] Embodiment 2: The oligonucleotide of Embodiment 1, wherein the sequence of nucleotides encoding PLN comprises a nucleotide sequence having at least 90% nucleotide sequence identity to SEQ ID NO: 2523.

[0165] Embodiment 3: The oligonucleotide of Embodiment 1 or 2, wherein the oligonucleotide targets a sequence of nucleotides corresponding to positions of SEQ ID NO: 2523 (NM_002667.5) selected from Table 4.

[0166] Embodiment 4: The oligonucleotide of any one of Embodiments 1-3, wherein the antisense strand is substantially or completely complementary to a sequence of nucleotides corresponding to an untranslated region of the PLN transcript.

[0167] Embodiment 5: The oligonucleotide of any one of Embodiments 1-4, wherein the oligonucleotide is an RNAi agent.

[0168] Embodiment 6: The oligonucleotide of Embodiment 5, wherein the oligonucleotide is a double stranded small interfering RNA, a short hairpin RNA, or a Dicer-substrate siRNA (DsiRNA).

[0169] Embodiment 7: The oligonucleotide of Embodiment 6, wherein the RNAi agent is a double-stranded small interfering RNA (siRNA) further comprising a sense strand, wherein the sense strand and antisense strand form a double stranded region.

[0170] Embodiment 8: The oligonucleotide of any one of Embodiments 1-7, wherein the antisense strand comprises a nucleotide sequence comprising at least 15 contiguous nucleotides (for example, 15, 16, 17, 18, 19, 20, or 21 contiguous nucleotides) differing by no more than 4, 3, 2, or 1 nucleotides from the nucleotide sequence of any one of SEQ ID NOs: 629-1256, 1885-2522, or 2644-2763, or a nucleotide sequence having at least 90% nucleotide sequence identity to a portion of the nucleotide sequence of any one of SEQ ID NOs: 629-1256, 1885-2522, or 2644-2763.

[0171] Embodiment 9: The oligonucleotide of any one of Embodiments 1-8, wherein the antisense strand comprises the nucleotide sequence of any one of SEQ ID NOs: 629-1256, 1885-2522, or 2644-2763.

[0172] Embodiment 10: The oligonucleotide of any one of Embodiments 7-9, wherein the sense strand comprises a nucleotide sequence differing by no more than 4, 3, 3, or 1 nucleotides from the nucleotide sequence of any one of SEQ ID NOs: 1-628, 1257-1884, or 2524-2643, or a nucleotide sequence having at least 90% nucleotide sequence identity to a portion of the nucleotide sequence of any one of SEQ ID NOs: 1-628, 1257-1884, or 2524-2643.

[0173] Embodiment 11: The oligonucleotide of any one of Embodiments 7-10, wherein the sense strand comprises the nucleotide sequence of any one of SEQ ID NOs: 1-628, 1257-1884, or 2524-2643.

[0174] Embodiment 12: The oligonucleotide of any one of Embodiments 7-11, wherein the antisense strand comprises a nucleotide sequence of any one of SEQ ID NOs: 629-1256, 1885-2522, or 2644-2763, and the sense strand comprises a nucleotide sequence of any one of SEQ ID NOs: 1-628, 1257-1884, or 2524-2643.

[0175] Embodiment 13: The oligonucleotide of any one of Embodiments 7-12, wherein each strand is no more than 30 nucleotides in length, or 19-30 nucleotides in length, or 19-23 nucleotides in length, or 19-21 nucleotides in length.

[0176] Embodiment 14: The oligonucleotide of any one of Embodiments 7-13, wherein at least one strand comprises a 3′ overhang of at least 1 nucleotide or at least 2 nucleotides.

[0177] Embodiment 15: The oligonucleotide of any one of Embodiments 7-14, wherein at least one strand comprises a 5′ overhang of at least 1 nucleotide, or at least 2 nucleotides.

[0178] Embodiment 16: The oligonucleotide of any one of Embodiments 7-15, wherein the double stranded region is 15-30 nucleotide pairs in length, or 15-23 nucleotide pairs in length, or 17-25 nucleotide pairs in length, or 19-23 nucleotide pairs in length, or 19-21 nucleotide pairs in length.

[0179] Embodiment 17: The oligonucleotide of any one of Embodiments 7-16, wherein the antisense strand is 21 nucleotides in length and the sense strand is 19 nucleotides in length, or the antisense strand is 19 nucleotides in length and the sense strand is 19 nucleotides in length.

[0180] Embodiment 18: The oligonucleotide of any one of Embodiments 1-4, wherein the oligonucleotide is a single-stranded antisense oligonucleotide (ASO).

[0181] Embodiment 19: The oligonucleotide of Embodiment 18, wherein the ASO comprises a nucleic acid sequence comprising at least 14 contiguous nucleotides (for example, 14, 15, 16, 17, 18, 19, 20, or 21 contiguous nucleotides) that differ by no more than 1, 2, 3, or 4 nucleotides from any one of SEQ ID NOs: 629-1256 or 2644-2763.

[0182] Embodiment 20: The oligonucleotide of Embodiment 18 or 19, wherein the ASO comprises a nucleic acid sequence comprising at least 14 contiguous nucleotides (for example, 14, 15, 16, 17, 18, 19, 20, or 21 contiguous nucleotides) that differ by no more than 1, 2, 3 or 4 nucleotides from any one of SEQ ID NOs: 1885-2522.

[0183] Embodiment 21: The oligonucleotide of any one of Embodiments 1-20, wherein the oligonucleotide comprises at least one or more modifications.

[0184] Embodiment 22: The oligonucleotide of Embodiment 21, wherein the one or more modifications is selected from a ribose modification, a backbone modification, a nucleobase modification, or a combination thereof.

[0185] Embodiment 23: The oligonucleotide of Embodiment 22, wherein the ribose modification comprises a locked nucleic acid (LNA), a tricyclo-DNA (tcDNA), 2′-deoxy-2′-fluoro, 2′-O-methyl, 2′-methoxyethyl (2′-MOE), 2′-deoxy-2′-arabino-fluoro, 2′-O-benzyl, 2′-O-methyl-4-pyridine, 2′ cyclic ethyl (cET), phosphorodiamidate morpholino (PMO), glycol nucleic acid (GNA), unlocked nucleic acid (UNA), a threose nucleic acid (TNA), or a combination thereof.

[0186] Embodiment 24: The oligonucleotide of Embodiment 23, wherein the ribose modification comprises a 2′-deoxy-2′-fluoro, 2′-O-methyl, glycol nucleic acid (GNA), unlocked nucleic acid (UNA), a threose nucleic acid (TNA), or a combination thereof.

[0187] Embodiment 25: The oligonucleotide of Embodiment 23 or 24, wherein the ribose modification is a 2′-deoxy-2′-fluoro modification, a 2′-O-methyl modification, or a combination thereof.

[0188] Embodiment 26: The oligonucleotide of any one of Embodiments 22-25, wherein the backbone modification comprises phosphorothioate, phosphorodithioate, methylphosphonate, methyoxypropyl-phosphonate, 5′-(E)-vinylphosphonate, 5′-methyl phosphonate, 5′-methyl phosphate, 5′-phosphorothioate, peptide nucleic acid (PNA), or a combination thereof.

[0189] Embodiment 27: The oligonucleotide of Embodiment 26, wherein the backbone modification comprises a phosphorothioate.

[0190] Embodiment 28: The oligonucleotide of any one of Embodiments 22-27, wherein the backbone modification comprises a phosphorothioate modification.

[0191] Embodiment 29: The oligonucleotide of any one of Embodiments 22-28, wherein the nucleobase modification comprises 5-substituted pyrimidines, 6-azapyrimidines and N-2, N-6 and 0-6 substituted purines, 5-methylcytosine (5-Me-C), 5-hydroxymethyl cytosine, xanthine, hypoxanthine, 2-aminoadenine, N6-alkyl derivatives, N2-alkyl, 2-thiouracil, 2-thiothymine, 2-thiocytosine, 5-halouracil, cytosine, 5-propynyl uracil, 5-propynyl cytosine, 6-azo uracil, 6-azo cytosine, 6-azo thymine, 5-uracil (pseudouracil), 4-thiouracil, 8-halo, 8-amino, 8-sulfhydryl, 8-thioalkyl, 8-hydroxy, 5-halo, 5-trifluoromethyl, N7-methylguanine, N7-methyladenine, 8-azaguanine, 8-azaadenine, 7-deazaguanine, 7-deazaadenine, 3-deazaguanine, 3-deazaadenine, or any combination thereof.

[0192] Embodiment 30: The oligonucleotide of Embodiment 29, wherein the oligonucleotide comprises at least one modified nucleotide selected from the group consisting of a deoxy nucleotide, a 3′-terminal deoxythymidine (dT) nucleotide, a 2′-O-methyl modified nucleotide, a 2′-deoxy-2′-fluoro modified nucleotide, a 2′-deoxy-modified nucleotide, a 2′-5′-linked ribonucleotide (3′-RNA), a locked nucleotide, an unlocked nucleotide, a conformationally restricted nucleotide, a constrained ethyl nucleotide, an abasic nucleotide, a 2′-amino-modified nucleotide, a 2′-O-allyl-modified nucleotide, 2′-C-alkyl-modified nucleotide, 2′-hydroxyl-modified nucleotide, a 2′-O-(methoxy ethyl) modified nucleotide, a 2′-O-alkyl-modified nucleotide, a morpholino nucleotide, a phosphoramidate morpholino, a non-natural base comprising nucleotide, a tetrahydropyran modified nucleotide, a 1,5-anhydrohexitol modified nucleotide, a cyclohexenyl modified nucleotide, a nucleotide comprising a 5′-phosphorothioate group, a nucleotide comprising a 5′-methylphosphonate group, a nucleotide comprising a 5′-methylphosphate group, a nucleotide comprising a 5′ phosphate or 5′ phosphate mimic, a nucleotide comprising vinyl phosphonate, a glycol nucleic acid (GNA), a glycol nucleic acid S-Isomer (S-GNA), a nucleotide comprising 2-hydroxymethyl-tetrahydrofurane-5-phosphate, a nucleotide comprising 2′-deoxythymidine-3′phosphate, a nucleotide comprising 2′-deoxyguanosine-3′-phosphate; a cytidine-2′-phosphate, a guanosine-2′-phosphate, a uridine-2′-phosphate, an adenosine-2′-phosphate, a 2′-O-hexadecyl-adenosine-3′-phosphate, a 2′-O-hexadecyl-cytidine-3′-phosphate, a 2′-O-hexadecyl-guanosine-3′-phosphate, and a 2′-O-hexadecyl-uridine-3′-phosphate, a 3′-3′ inverted nucleotide linkage, a 5′-5′ inverted nucleotide linkage, TNA, and combinations thereof.

[0193] Embodiment 31: The oligonucleotide of Embodiment 30, wherein oligonucleotide comprises a modified nucleotide selected from the group consisting of a deoxy nucleotide, a 3′-terminal deoxythymidine (dT) nucleotide, a 3′-3′ inverted nucleotide linkage, a 5′-5′ inverted nucleotide linkage, or a 5′-(E)-vinylphosphonate-2′-O-methyl-uridine-3′-phosphate, and a combination thereof.

[0194] Embodiment 32: The oligonucleotide of Embodiment 30 or 31, wherein the oligonucleotide comprises 5′-(E)-vinylphosphonate-2′-O-methyl-uridine-3′-phosphate.

[0195] Embodiment 33: The oligonucleotide of Embodiment 21, wherein at least one of the modifications is a thermally destabilizing nucleotide modification.

[0196] Embodiment 34: The oligonucleotide of Embodiment 33, wherein the thermally destabilizing nucleotide modification is selected from the group consisting of an abasic modification; a mismatch with the opposing nucleotide in the duplex; destabilizing sugar modification, a 2′-deoxy modification, an acyclic nucleotide, an unlocked nucleic acids (UNA); a glycerol nucleic acid (GNA), and a combination thereof.

[0197] Embodiment 35: The oligonucleotide of Embodiment 31, wherein the modification comprises a short sequence of 3′-terminal deoxythymidine nucleotide (dT).

[0198] Embodiment 36: The oligonucleotide of any one of Embodiments 21-35, wherein the modifications on the nucleotides are 2′-O-methyl and 2′deoxy-2′-fluoro modifications.

[0199] Embodiment 37: The oligonucleotide of any one of Embodiments 21-36, wherein the oligonucleotide comprises at least one phosphorothioate internucleoside or phosphorodithioate internucleoside linkage.

[0200] Embodiment 38: The oligonucleotide of Embodiment 37, wherein the oligonucleotide comprises 6-8 phosphorothioate internucleoside linkages.

[0201] Embodiment 39: The oligonucleotide of Embodiments 37 or 38, wherein the oligonucleotide comprises at least 1, or at least 2, phosphorothioate internucleoside linkage at a 5′ end of the sense strand.

[0202] Embodiment 40: The oligonucleotide of any one of Embodiments 37-39, wherein the oligonucleotide comprises at least 1 phosphorothioate internucleoside linkage at a 3′ end of the sense strand.

[0203] Embodiment 41: The oligonucleotide of any one of Embodiments 37-40, wherein the oligonucleotide comprises at least 1, or at least 2, phosphorothioate internucleoside linkage at a 5′ end of the antisense strand.

[0204] Embodiment 42: The oligonucleotide of any one of Embodiments 37-41, wherein the oligonucleotide comprises at least 1 phosphorothioate internucleoside linkage at a 3′ end of the antisense strand.

[0205] Embodiment 43: The oligonucleotide of any one of Embodiments 37-42, wherein no more than five of the nucleotides of the antisense strand are unmodified nucleotides.

[0206] Embodiment 44: The oligonucleotide of any one of Embodiments 37-43, wherein all the nucleotides of the antisense strand are modified nucleotides.

[0207] Embodiment 45: The oligonucleotide of any one of Embodiments 37-44, wherein no more than five of the nucleotides of the sense strand are unmodified nucleotides.

[0208] Embodiment 46: The oligonucleotide of any one of Embodiments 37-45, wherein all the nucleotides of the sense strand are modified nucleotides.

[0209] Embodiment 47: The oligonucleotide of any one of Embodiments Error! Reference source not found.-Error! Reference source not found., wherein the antisense strand comprises a chemical modification pattern according to (Nfs)ₐ(nNf)_{b}(ns)_{c}n, wherein:
[0210] n is a 2′-O-methyl-nucleoside-3′-phosphate;
[0211] Nfs is a 2′-deoxy-2′-fluoro-nucleoside-3′-phosphorothioate;
[0212] Nf is a 2′-deoxy-2′-fluoro-nucleoside-3′-phosphate;
[0213] ns is a 2′-O-methyl-nucleoside-3′-phosphorothioate;
[0214] a is at least 1;
[0215] b is at least 5-10; and
[0216] c is at least 1.

[0217] Embodiment 48: The oligonucleotide of Embodiment Error! Reference source not found., wherein the antisense strand comprises a chemical modification pattern NfsNfsnNfnNfnNfnNfnNfnNfnNfnNfnsnsn.

[0218] Embodiment 49: The oligonucleotide of any one of Embodiments Error! Reference source not found.-Error! Reference source not found., wherein the sense strand comprises a chemical modification pattern according to (ns)_{d}(Nfn)ₑNf, wherein:
[0219] n is a 2′-O-methyl-nucleoside-3′-phosphate;
[0220] Nf is a 2′-deoxy-2′-fluoro-nucleoside-3′-phosphate;
[0221] ns is a 2′-O-methyl-nucleoside-3′-phosphorothioate;
[0222] d is at least 1; and
[0223] e is 5-10.

[0224] Embodiment 50: The oligonucleotide of Embodiment Error! Reference source not found., wherein the sense strand comprises a chemical modification pattern nsnsNfnNfnNfnNfnNfnNfnNfnNfnNf.

[0225] Embodiment 51: The oligonucleotide of any one of Embodiments Error! Reference source not found.-Error! Reference source not found., wherein each of the antisense and the sense strand is independently 17-23 nucleotides in length, wherein the antisense strand comprises the motif F(SF)nSnn, wherein n is from 2 to about 20, nn is 0 or 1, one of F and S is a 2′-deoxy-2′-fluoro modified nucleoside and the other of F and S is a 2′-O-methyl modified nucleoside.

[0226] Embodiment 52: The oligonucleotide of any one of Embodiments Error! Reference source not found.-Error! Reference source not found., wherein the antisense strand comprises the chemical modification pattern of nNfnnnNfnNfNfnnnnNfnNfnnnnn and the sense strand comprises the chemical modification nnnnnnNfnNfNfNfnnnnnnnn, wherein n is a 2′-O-methyl-nucleoside and Nf is a 2′-deoxy-2′-fluoro-nucleoside.

[0227] Embodiment 53: The oligonucleotide of any one of Embodiments Error! Reference source not found.-Error! Reference source not found., wherein each of the antisense and the sense strand is independently 20-23 nucleotides in length, wherein the antisense strand comprises a region having the formula X1-Y—X2, wherein Y is a subregion of from about 5 to about 12 linked nucleosides and each of X1 subregion and X2 subregion is, independently, a plurality of linked nucleosides having the formula FSFS, where one of F and S is a 2′-deoxy-2′-fluoro modified nucleoside and the other of F and S is a 2′-O-methyl modified nucleoside; and each internucleoside linkage of X1 subregion and X2 subregion is, independently, a phosphodiester or a phosphorothioate internucleoside linkage.

[0228] Embodiment 54: The oligonucleotide of any one of Embodiments Error! Reference source not found.-Error! Reference source not found., wherein each of the antisense and the sense strand is independently 17-23 nucleotides in length, wherein the antisense strand comprises a contiguous sequence of linked nucleosides that define an alternating motif of the formula:

5′-Q(-L-Z-L-Q)n(-L-Z)nn-3′
[0229] wherein:
[0230] each L is an internucleoside linking group;
[0231] either each Q is a 2′-deoxy-2′-fluoro-nucleoside and each Z is a 2′-O-methyl nucleoside;
[0232] or each Q is a 2′-O-methyl nucleoside and each Z is a 2′-deoxy-2′-fluoro nucleoside;
[0233] n is from 8 to 14; and
[0234] nn is 0 or 1.

[0235] Embodiment 55: The oligonucleotide of any one of Embodiments 7-Error! Reference source not found., wherein the antisense strand is 19-25 nucleotides in length and is represented by the formula:

[chemical structure]

[0236] wherein:
[0237] B1′, B2′, B3′, and B4′ each independently represent a nucleotide containing a modification selected from the group consisting of 2′-O-alkyl, 2′-substituted alkoxy, 2′-substituted alkyl, 2′-halo, ENA, and BNA/LNA;
[0238] T1′, T2′, and T3′ each independently represent a nucleotide comprising a chemical modification selected from the group consisting of DNA, RNA, LNA, 2′-deoxy-2′-fluoro, and 5′-methyl-2′-deoxy-2′-fluoro nucleotides;
[0239] q1 is 4 to 15 nucleotides in length;
[0240] q3 or q7 is independently 1-6 nucleotide(s) in length;
[0241] q2 or q6 is independently 1-3 nucleotide(s) in length;
[0242] q4 is 0-3 nucleotide(s) in length; and
[0243] q5 is 0-10 nucleotide(s) in length;

[0244] wherein:

[0245] the antisense strand has 2′-deoxy-2′-fluoro modifications, and wherein the 2′-deoxy-2′-fluoro modifications on the antisense strand consist of four, and only four, 2′-deoxy-2′-fluoro modifications or six, and only six, 2′-deoxy-2′-fluoro modifications.

[0246] Embodiment 56: The oligonucleotide of any one of Embodiments Error! Reference source not found.-Error! Reference source not found., wherein the antisense strand and sense strand are each 14 to 40 nucleotides, and are represented by the formula:

[chemical structure]

wherein:
[0247] B1, B1′, B2′, B3′, and B4′ each independently represent a nucleotide containing a modification selected from the group consisting of 2′-O-alkyl, 2′-substituted alkoxy, 2′-substituted alkyl, 2′-halo, ENA, and BNA/LNA;
[0248] C1 is a thermally destabilizing nucleotide, selected from the group consisting of i) a nucleotide that forms a mismatch pair with the opposing nucleotide in the antisense strand, ii) a nucleotide having an abasic modification, and iii) a nucleotide having a sugar modification, and placed at a site opposite to the seed region (positions 2-8) of the antisense strand;
[0249] T1′, T2′, and T3′ each independently represent a nucleotide comprising a modification providing the nucleotide a steric bulk that is less than or equal to the steric bulk of a 2′-OMe modification, wherein the modification is at the 2′-position of a ribose sugar of the nucleotide or at a position of a non-ribose nucleotide similar to the 2′-position of a ribose sugar;
[0250] each n1, and q1 is independently 4 to 15 nucleotides in length;
[0251] each q3, and q7 is independently 1-6 nucleotide(s) in length;
[0252] each q2 and q6 is independently 1-3 nucleotide(s) in length;
[0253] q5 is 0-10 nucleotide(s) in length;
[0254] each n4, and q4 is independently 0-3 nucleotide(s) in length;
[0255] n2 is 3 nucleotides in length, and T1 each are 2′-deoxy-2′-fluoro nucleotides;
[0256] n3 is 7 nucleotides in length, and B2 each are 2′-OMe nucleotides; and
[0257] n5 is 3 nucleotides in length, and B3 each are 2′-OMe nucleotides.

[0258] Embodiment 57: The oligonucleotide of any one of Embodiments Error! Reference source not found.-Error! Reference source not found., wherein the antisense strand and sense strand are each 19-25 nucleotides in length, wherein the antisense strand is represented by the formula:

[chemical structure]

[0259] wherein:
[0260] B1, B2, and B3 each independently represent a nucleotide containing a modification selected from the group consisting of 2′-O-alkyl, 2′-substituted alkoxy, 2′-substituted alkyl, 2′-halo, ENA, and BNA/LNA;
[0261] C1 is a thermally destabilizing nucleotide, selected from the group consisting of i) a nucleotide that forms a mismatch pair with the opposing nucleotide in the antisense strand, ii) a nucleotide having an abasic modification, and iii) a nucleotide having a sugar modification, and placed at a site opposite to the seed region (positions 2-8) of the antisense strand;
[0262] T1 represents a nucleotide comprising a 2′-deoxy-2′-fluoro modification;
[0263] n1 or n3 is independently 4 to 15 nucleotides in length;
[0264] n5 is 1-6 nucleotide(s) in length;
[0265] n2 is 3;
[0266] n4 is 0-3 nucleotide(s) in length; and
[0267] wherein the sense strand has 2′-deoxy-2′-fluoro modifications, and wherein the 2′-deoxy-2′-fluoro modifications on the sense strand consist of four, and only four, 2′-deoxy-2′-fluoro modifications, wherein the four 2′-deoxy-2′-fluoro modifications are at positions 7 and 9-11 from the 5′-end of the sense strand.

[0268] Embodiment 58: The oligonucleotide of any one of Embodiments Error! Reference source not found.-Error! Reference source not found., wherein the antisense strand is complementary to at least one portion of a mRNA of the target gene (e.g., PLN), wherein:
[0269] the sense strand comprises 19-22 nucleotides,
[0270] the antisense strand comprises 19-25 nucleotides; and
[0271] the oligonucleotide is represented by the formula:

[chemical structure]

[0272] wherein:
   [0273] B1′, B2′, B3′, and B4′ each independently represent a nucleotide containing a modification selected from the group consisting of 2′-O-methyl and 2′-deoxy-2′-fluoro;
   [0274] each B1, B2, and B3 is 2′-O-methyl nucleotide;
   [0275] C1 is glycerol nucleic acid (GNA) placed at a site opposite to the seed region (positions 2-8) of the antisense strand;
   [0276] T1′, T2′, and T3′ are each 2′-F, wherein:
      [0277] T1′ is at position 14 from the 5′ end of the antisense strand, and q2 is 1; and
      [0278] T3′ is at position 2 from the 5′ end of the antisense strand, and q6 and q7 are 1;
[0279] each n1, n3, and q1 is independently 4 to 15 nucleotides in length;
[0280] each n5 and q3 is independently 1-6 nucleotide(s) in length;
[0281] q5 is 0-10 nucleotide(s) in length;
[0282] each n4 and q4 is independently 0-3 nucleotide(s) in length;
[0283] n2 is 3 nucleotides in length;
[0284] T1 each are 2′-deoxy-2′-fluoro nucleotides;
[0285] wherein
[0286] (a) the oligonucleotide is covalently conjugated to at least one ligand; and
[0287] (b) one of the T1 nucleotides is at position 11 from the 5′ end of the sense strand.

[0288] Embodiment 59: The oligonucleotide of any one of Embodiments Error! Reference source not found.-Error! Reference source not found., wherein the sense strand comprises 19-22 nucleotides, the antisense strand comprises 19-25 nucleotides; and the oligonucleotide is represented by the formula:

[chemical structure]

wherein:
[0289] B1′, B2′, B3′, and B4′ each independently represent a nucleotide containing a modification selected from the group consisting of 2′-O-methyl and 2′-deoxy-2′-fluoro;
[0290] each B1, B2, and B3 is 2′-OMe;
[0291] C1 is glycerol nucleic acid (GNA) placed at a site opposite to the seed region (positions 2-8) of the antisense strand;
   [0292] T1′, T2′, and T3′ are each 2′-deoxy-2′-fluoro, wherein: T1′ is at position 14 from the 5′ end of the antisense strand, and q2 is 1; and
   [0293] T3′ is at position 2 from the 5′ end of the antisense strand, and q6 and q7 are 1;
[0294] each n1, n3, and q1 is independently 4 to 15 nucleotides in length;
[0295] each n5 and q3 is independently 1-6 nucleotide(s) in length;
[0296] q5 is 0-10 nucleotide(s) in length;
[0297] each n4 and q4 is independently 0-3 nucleotide(s) in length;
[0298] n2 is 3 nucleotides in length; and
[0299] T1 each are 2′-deoxy-2′-fluoro, and
[0300] wherein
   [0301] (a) the oligonucleotide is covalently conjugated to at least one ligand;
   [0302] (b) one of the T1 nucleotides is at a position in the sense strand that is opposite to position 11 from the 5′ end of the antisense strand; and
   [0303] (c) the oligonucleotide comprises at least one phosphorothioate internucleoside linkage.

[0304] Embodiment 60: The oligonucleotide of any one of Embodiments 7-59, wherein the antisense strand and sense strand are each 14 to 40 nucleotides, wherein the antisense strand has sufficient complementarity to a target sequence to mediate RNA interference, wherein said sense strand comprises at least one thermally destabilizing modification of the duplex within the first 9 nucleotide positions of the 5′ region of the antisense strand or a precursor thereof, wherein the antisense strand further comprises one or both of the following characteristics:
[0305] (i) 2, 3, 4, 5 or 6 2′-deoxy-2′-fluoro modifications; and
[0306] (ii) 1, 2, 3, 4 or 5 phosphorothioate internucleoside linkages; and
[0307] said sense strand comprises one, or both of the following characteristics:
[0308] (iii) 2, 3, 4, or 5 2′-deoxy-2′-fluoro modifications; and
[0309] (iv) 1, 2, 3, 4 or 5 phosphorothioate internucleoside linkages.

[0310] Embodiment 61: The oligonucleotide of any one of Embodiments 7-46, wherein the antisense strand comprises a modification pattern nsNfsnnnNfnNfNfnnnnNfnNfnnnsnsn, wherein ns is a 2′-O-methyl-nucleoside-3′-phosphorothioate; Nfs is a 2′-deoxy-2′-fluoro-nucleoside-3′-phosphorothioate; n is a 2′-O-methyl-nucleoside-3′-phosphate; and Nf is a 2′-deoxy-2′-fluoro-nucleoside-3′-phosphate.

[0311] Embodiment 62: The oligonucleotide of any one of Embodiments 7-46, wherein the antisense strand disclosed herein comprises a modification pattern vpUsNfsnnnNfnNfNfnnnnNfnNfnnnsnsn, wherein vpUs is a 5′-vinylphosphonate-2′-O-methyl-uridine-3′-phosphorothioate; ns is a 2′-O-methyl-nucleoside-3′-phosphorothioate; Nfs is a 2′-deoxy-2′-fluoro-nucleoside-3′-phosphorothioate; n is a 2′-O-methyl-nucleoside-3′-phosphate; and Nf is a 2′-deoxy-2′-fluoro-nucleoside-3′-phosphate.

[0312] Embodiment 63: The oligonucleotide of any one of Embodiments 7-46, wherein the sense strand disclosed herein comprises a modification pattern nsnsnnNfnNfNfNfnnnnnnnnnn, wherein ns is a 2′-O-methyl-nucleoside-3′-phosphorothioate; n is a 2′-O-methyl-nucleoside-3′-phosphate; and Nf is a 2′-deoxy-2′-fluoro-nucleoside-3′-phosphate.

[0313] Embodiment 64: The oligonucleotide of any one of Embodiments 7-46, wherein the sense strand disclosed herein comprises a modification pattern NfsnsNfnNfnNfnNfnNfnNfnNfnNfnNf, wherein ns is a 2′-O-methyl-nucleoside-3′-phosphorothioate; Nfs is a 2′-deoxy-2′-fluoro-nucleoside-3′-phosphorothioate; n is a 2′-O-methyl-nucleoside-3′-phosphate; and Nf is a 2′-deoxy-2′-fluoro-nucleoside-3′-phosphate.

[0314] Embodiment 65: The oligonucleotide of any one of Embodiments 7-46, wherein the sense strand comprises a modification pattern nsnsnnNfnNfNfNfnnnnnnnnnn, and the antisense strand comprises a modification pattern nsNfsnnnNfnNfNfnnnnNfnNfnnnsnsn, wherein ns is a 2′-O-methyl-nucleoside-3′-phosphorothioate; Nfs is a 2′-deoxy-2′-fluoro-nucleoside-3′-phosphorothioate; n is a 2′-O-methyl-nucleoside-3′-phosphate; and Nf is a 2′-deoxy-2′-fluoro-nucleoside-3′-phosphate.

[0315] Embodiment 66: The oligonucleotide of any one of Embodiments 7-46, wherein the sense strand comprises a modification pattern nsnsnnNfnNfNfNfnnnnnnnnnn, and the antisense strand comprises a modification pattern vpUsNfsnnnNfnNfNfnnnnNfnNfnnnsnsn, wherein vpUs is a 5′-vinylphosphonate-2′-O-methyl-uridine-3′-phosphorothioate; ns is a 2′-O-methyl-nucleoside-3′-phosphorothioate; Nfs is a 2′-deoxy-2′-fluoro-nucleoside-3′-phosphorothioate; n is a 2′-O-methyl-nucleoside-3′-phosphate; and Nf is a 2′-deoxy-2′-fluoro-nucleoside-3′-phosphate.

[0316] Embodiment 67: The oligonucleotide of any one of Embodiments 7-66, wherein the antisense strand comprises a nucleotide sequence according to any one of SEQ ID NOs: 1885-2522.

[0317] Embodiment 68: The oligonucleotide of Embodiment 67, wherein the sense strand comprises a nucleotide sequence according to any one of SEQ ID NOs: 1257-1884.

[0318] Embodiment 69: The oligonucleotide of any one of Embodiments 7-68, further comprising a terminal, chiral modification occurring at the first internucleoside linkage at the 3′-end of the antisense strand, having the linkage phosphorus atom in Sp configuration, a terminal, chiral modification occurring at the first internucleoside linkage at the 5′-end of the antisense strand, having the linkage phosphorus atom in Rp configuration, and a terminal, chiral modification occurring at the first internucleoside linkage at the 5′-end of the sense strand, having the linkage phosphorus atom in either Rp configuration or Sp configuration.

[0319] Embodiment 70: The oligonucleotide of any one of Embodiments 7-69, further comprising a terminal, chiral modification occurring at the first and second internucleoside linkages at the 3′-end of the antisense strand, having the linkage phosphorus atom in Sp configuration, a terminal, chiral modification occurring at the first internucleoside linkage at the 5′-end of the antisense strand, having the linkage phosphorus atom in Rp configuration, and a terminal, chiral modification occurring at the first internucleoside linkage at the 5′-end of the sense strand, having the linkage phosphorus atom in either Rp or Sp configuration.

[0320] Embodiment 71: The oligonucleotide of any one of Embodiments 7-70, further comprising a terminal, chiral modification occurring at the first, second and third internucleoside linkages at the 3′ end of the antisense strand, having the linkage phosphorus atom in Sp configuration, a terminal, chiral modification occurring at the first internucleoside linkage at the 5′-end of the antisense strand, having the linkage phosphorus atom in Rp configuration, and a terminal, chiral modification occurring at the first internucleoside linkage at the 5′-end of the sense strand, having the linkage phosphorus atom in either Rp or Sp configuration.

[0321] Embodiment 72: The oligonucleotide of any one of Embodiments 7-71, further comprising a terminal, chiral modification occurring at the first, and second internucleoside linkages at the 3′ end of the antisense strand, having the linkage phosphorus atom in Sp configuration, a terminal, chiral modification occurring at the third internucleoside linkages at the 3′-end of the antisense strand, having the linkage phosphorus atom in Rp configuration, a terminal, chiral modification occurring at the first internucleoside linkage at the 5′-end of the antisense strand, having the linkage phosphorus atom in Rp configuration, and a terminal, chiral modification occurring at the first internucleoside linkage at the 5′-end of the sense strand, having the linkage phosphorus atom in either Rp or Sp configuration.

[0322] Embodiment 73: The oligonucleotide of any one of Embodiments 7-72, further comprising a terminal, chiral modification occurring at the first, and second internucleoside linkages at the 3′-end of the antisense strand, having the linkage phosphorus atom in Sp configuration, a terminal, chiral modification occurring at the first, and second internucleoside linkages at the 5′-end of the antisense strand, having the linkage phosphorus atom in Rp configuration, and a terminal, chiral modification occurring at the first internucleoside linkage at the 5′-end of the sense strand, having the linkage phosphorus atom in either Rp or Sp configuration.

[0323] Embodiment 74: The oligonucleotide of any one of Embodiments 7-73, further comprising a phosphate or phosphate mimic at the 5′-end of the antisense strand.

[0324] Embodiment 75: The oligonucleotide of Embodiment 74, wherein the phosphate mimic is a 5′-vinyl phosphonate (VP).

[0325] Embodiment 76: The oligonucleotide of any one of Embodiments 1-75, further comprising a targeting moiety.

[0326] Embodiment 77: The oligonucleotide of Embodiment 76, wherein the targeting ligand is a small molecule-based, sugar-based (e.g., saccharide-based), fatty acid-based, protein-based, or nucleic acid-based targeting ligand.

[0327] Embodiment 78: The oligonucleotide of Embodiment 77, wherein the protein-based targeting ligand is an antibody, nanobody, affibody, peptibody, or a peptide.

[0328] Embodiment 79: An oligonucleotide selected from the sense strands, antisense strands, and RNAi agents as listed in Tables 1A, 1B, and 1C, or a pharmaceutically acceptable salt thereof.

[0329] Embodiment 80: A pharmaceutical composition comprising the oligonucleotide of any one of Embodiments 1-79, or a pharmaceutically acceptable salt thereof, and a pharmaceutically acceptable carrier or excipient.

[0330] Embodiment 81: A method for inhibiting PLN expression or treating a PLN related disorder in a subject, the method comprising administering an effective amount of the oligonucleotide of any one of Embodiments 1-79, or a pharmaceutically acceptable salt thereof, or the pharmaceutical composition of Embodiment 80 to the subject.

[0331] Embodiment 82: The method of Embodiment 81, wherein the subject is a human.

[0332] Embodiment 83: The method of Embodiment 81 or 82, wherein the reduction of PLN mRNA or protein expression levels is measured in a population of myocytes or cardiomyocytes derived from the subject.

[0333] Embodiment 84: The method of any one of Embodiments 81-83, wherein the reduction of PLN mRNA or protein expression levels is measured in tissues derived from the subject.

[0334] Embodiment 85: The method of any one of Embodiments 81-84, wherein the PLN-related disorder is inherited human dilated cardiomyopathy, familial hypertrophic cardiomyopathy, heart failure, PLN-R14Del heart disease, heart disease associated with a gain-of-function mutation in PLN, inherited dilated cardiomyopathy associated with a PLN mutation (e.g., a mutation that results in protein aggregation and/or unfolded protein response), non-familial form of heart failure with reduced ejection fraction, arrhythmia, or cardiomyopathy.

[0335] Embodiment 86: The method of any one of Embodiments 81-85, further comprising administering to the subject an additional agent or a therapy suitable for treatment or prevention of a PLN related disorder.

[0336] Embodiment 87: An RNAi oligonucleotide comprising a sense strand and an antisense strand, wherein the sense strand and the antisense strand form a duplex, wherein the sense strand and antisense strands are selected from the group consisting of:

| SEQ | | SEQ | |
|---|---|---|---|
| ID NO: | Sense strand | ID NO: | Antisense strand |
| 1402 | ususguGfaAfAfAfggucaagaua | 2030 | usAfsucuUfgAfCfcuuuUfcAfcaasusu |
| 1403 | usgsugAfaAfAfGfgucaagauua | 2031 | usAfsaucUfuGfAfccuuUfuCfacasusu |
| 1404 | asasaaGfgUfCfAfagauuaagaa | 2032 | usUfscuuAfaUfCfuugaCfcUfuuususu |
| 1471 | uscscuGfaGfUfAfgaagaguuua | 2099 | usAfsaacUfcUfUfcuacUfcAfggasusu |
| 1472 | csusgaGfuAfGfAfagaguuucua | 2100 | usAfsgaaAfcUfCfuucuAfcUfcagsusu |
| 1474 | gsgsauCfuUfGfUfaaacaugaaa | 2102 | usUfsucaUfgUfUfuacaAfgAfuccsusu |
| 1670 | gscsuuGfcCfAfCfaucagcuuaa | 2298 | usUfsaagCfuGfAfugugGfcAfagcsusu |
| 1671 | csusugCfcAfCfAfucagcuuaaa | 2299 | usUfsuaaGfcUfGfauguGfgCfaagsusu |
| 1672 | ususgcCfaCfAfUfcagcuuaaaa | 2300 | usUfsuuaAfgCfUfgaugUfgGfcaasusu |
| 1688 | gsusgaAfaAfGfGfucaagauuaa | 2316 | usUfsaauCfuUfGfaccuUfuUfcacsusu |
| 1402 | ususguGfaAfAfAfggucaagaua | 2513 | vpUsAfsucuUfgAfCfcuuuUfcAfcaasusu |
| 1403 | usgsugAfaAfAfGfgucaagauua | 2514 | vpUsAfsaucUfuGfAfccuuUfuCfacasusu |
| 1404 | asasaaGfgUfCfAfagauuaagaa | 2515 | vpUsUfscuuAfaUfCfuugaCfcUfuuususu |
| 1471 | uscscuGfaGfUfAfgaagaguuua | 2516 | vpUsAfsaacUfcUfUfcuacUfcAfggasusu |
| 1472 | csusgaGfuAfGfAfagaguuucua | 2517 | vpUsAfsgaaAfcUfCfuucuAfcUfcagsusu |
| 1474 | gsgsauCfuUfGfUfaaacaugaaa | 2518 | vpUsUfsucaUfgUfUfuacaAfgAfuccsusu |
| 1670 | gscsuuGfcCfAfCfaucagcuuaa | 2519 | vpUsUfsaagCfuGfAfugugGfcAfagcsusu |
| 1671 | csusugCfcAfCfAfucagcuuaaa | 2520 | vpUsUfsuaaGfcUfGfauguGfgCfaagsusu |
| 1672 | ususgcCfaCfAfUfcagcuuaaaa | 2521 | vpUsUfsuuaAfgCfUfgaugUfgGfcaasusu |
| 1688 | gsusgaAfaAfGfGfucaagauuaa | 2522 | vpUsUfsaauCfuUfGfaccuUfuUfcacsusu |

[0337] wherein:
[0338] Af represents 2′-deoxy-2′-fluoro-adenosine-3′-phosphate;
[0339] Afs represents 2′-deoxy-2′-fluoro-adenosine-3′-phosphorothioate;
[0340] Cf represents 2′-deoxy-2′-fluoro-cytidine-3′-phosphate;
[0341] Gf represents 2′-deoxy-2′-fluoro-guanosine-3′-phosphate;
[0342] Uf represents 2′-deoxy-2′-fluoro-uridine-3′-phosphate;
[0343] Ufs represents 2′-deoxy-2′-fluoro-uridine-3′-phosphorothioate;
[0344] a represents 2′-O-methyl-adenosine-3′-phosphate;
[0345] as represents 2′-O-methyl-adenosine-3′-phosphorothioate;
[0346] c represents 2′-O-methyl-cytidine-3′-phosphate;
[0347] cs represents 2′-O-methyl-cytidine-3′-phosphorothioate;
[0348] g represents 2′-O-methyl-guanosine-3′-phosphate;
[0349] gs represents 2′-O-methyl-guanosine-3′-phosphorothioate;
[0350] u represents 2′-O-methyl-uridine-3′-phosphate;
[0351] us represents 2′-O-methyl-uridine-3′-phosphorothioate; and
[0352] vpUs represents 5′-vinylphosphonate-2′-O-methyl-uridine-3′-phosphorothioate.

[0353] Embodiment 88. The RNAi oligonucleotide of Embodiment 87, wherein the sense strand is ususguGfaAfAfAfggucaagaua (SEQ ID NO: 1402), and the antisense strand is usAfsucuUfgAfCfcuuuUfcAfcaasusu (SEQ ID NO: 2030).

[0354] Embodiment 89: The RNAi oligonucleotide of Embodiment 87, wherein the sense strand is usgsugAfaAfAfGfgucaagauua (SEQ ID NO: 1403), and the antisense strand is usAfsaucUfuGfAfccuuUfuCfacasusu (SEQ ID NO: 2031).

[0355] 4. The RNAi oligonucleotide of Embodiment 87, wherein the sense strand is asasaaGfgUfCfAfagauuaagaa(SEQ ID NO: 1404), and the antisense strand is usUfscuuAfaUfCfuugaCfcUfuuususu (SEQ ID NO: 2032).

[0356] 5. The RNAi oligonucleotide of Embodiment 87, wherein the sense strand is uscscuGfaGfUfAfgaagaguuua (SEQ ID NO: 1471), and the antisense strand is usAfsaacUfcUfUfcuacUfcAfggasusu (SEQ ID NO: 2099).

[0357] 6. The RNAi oligonucleotide of Embodiment 87, wherein the sense strand is csusgaGfuAfGfAfagaguuucua (SEQ ID NO: 1472), and the antisense strand is usAfsgaaAfcUfCfuucuAfcUfcagsusu (SEQ ID NO: 2100).

[0358] 7. The RNAi oligonucleotide of Embodiment 87, wherein the sense strand is gsgsauCfuUfGfUfaaacaugaaa(SEQ ID NO: 1474), and the antisense strand is usUfsucaUfgUfUfuacaAfgAfuccsusu (SEQ ID NO: 2102).

[0359] 8. The RNAi oligonucleotide of Embodiment 87, wherein the sense strand is gscsuuGfcCfAfCfaucagcuuaa(SEQ ID NO: 1670), and the antisense strand is usUfsaagCfuGfAfugugGfcAfagcsusu (SEQ ID NO: 2298).

[0360] 9. The RNAi oligonucleotide of Embodiment 87, wherein the sense strand is csusugCfcAfCfAfucagcuuaaa (SEQ ID NO: 1671), and the antisense strand is usUfsuaaGfcUfGfauguGfgCfaagsusu (SEQ ID NO: 2299).

[0361] 10. The RNAi oligonucleotide of Embodiment 87, wherein the sense strand is ususgcCfaCfAfUfcagcuuaaaa(SEQ ID NO: 1672), and the antisense strand is usUfsuuaAfgCfUfgaugUfgGfcaasusu (SEQ ID NO: 2300).

[0362] 11. The RNAi oligonucleotide of Embodiment 87, wherein the sense strand is gsusgaAfaAfGfGfucaagauuaa (SEQ ID NO: 1688), and the antisense strand is usUfsaauCfuUfGfaccuUfuUfcacsusu (SEQ ID NO: 2316).

[0363] 12. The RNAi oligonucleotide of Embodiment 87, wherein the sense strand is ususguGfaAfAfAfggucaagaua (SEQ ID NO: 1402), and the antisense strand is vpUsAfsucuUfgAfCfcuuuUfcAfcaasusu (SEQ ID NO: 2513).

[0364] 13. The RNAi oligonucleotide of Embodiment 87, wherein
[0365] the sense strand is usgsugAfaAfAfGfgucaagauua (SEQ ID NO: 1403), and the antisense strand is vpUsAfsaucUfuGfAfccuuUfuCfacasusu (SEQ ID NO: 2514).

[0366] 14. The RNAi oligonucleotide of Embodiment 87, wherein the sense strand is asasaaGfgUfCfAfagauuaagaa(SEQ ID NO: 1404), and the antisense strand is vpUsUfscuuAfaUfCfuugaCfcUfuuususu (SEQ ID NO: 2515).

[0367] 15. The RNAi oligonucleotide of Embodiment 87, wherein the sense strand is uscscuGfaGfUfAfgaagaguuua (SEQ ID NO: 1471), and the antisense strand is vpUsAfsaacUfcUfUfcuacUfcAfggasusu (SEQ ID NO: 2516).

[0368] 16. The RNAi oligonucleotide of Embodiment 87, wherein the sense strand is csusgaGfuAfGfAfagaguuucua (SEQ ID NO: 1472), and the antisense strand is vpUsAfsgaaAfcUfCfuucuAfcUfcagsusu (SEQ ID NO: 2517).

[0369] 17. The RNAi oligonucleotide of Embodiment 87, wherein the sense strand is gsgsauCfuUfGfUfaaacaugaaa (SEQ ID NO: 1474), and the antisense strand is vpUsUfsucaUfgUfUfuacaAfgAfuccsusu (SEQ ID NO: 2518).

[0370] 18. The RNAi oligonucleotide of Embodiment 87, wherein the sense strand is gscsuuGfcCfAfCfaucagcuuaa (SEQ ID NO: 1670), and the antisense strand is vpUsUfsaagCfuGfAfugugGfcAfagcsusu (SEQ ID NO: 2519).

[0371] 19. The RNAi oligonucleotide of Embodiment 87, wherein the sense strand is csusugCfcAfCfAfucagcuuaaa (SEQ ID NO: 1671), and the antisense strand is vpUsUfsuaaGfcUfGfauguGfgCfaagsusu (SEQ ID NO: 2520).

[0372] 20. The RNAi oligonucleotide of Embodiment 87, wherein the sense strand is ususgcCfaCfAfUfcagcuuaaaa(SEQ ID NO: 1672), and the antisense strand is vpUsUfsuuaAfgCfUfgaugUfgGfcaasusu (SEQ ID NO: 2521).

[0373] 21. The RNAi oligonucleotide of Embodiment 87, wherein the sense strand is gsusgaAfaAfGfGfucaagauuaa (SEQ ID NO: 1688), and the antisense strand is vpUsUfsaauCfuUfGfaccuUfuUfcacsusu (SEQ ID NO: 2522).

[0374] 22. A pharmaceutical composition comprising the RNAi oligonucleotide of Embodiment 87, or a pharmaceutically acceptable salt thereof, and a pharmaceutically acceptable carrier or excipient.

[0375] 23. A method for inhibiting Phospholamban (PLN) expression or treating a PLN related disorder in a subject, the method comprising administering to the subject an effective amount of the RNAi oligonucleotide of Embodiment 87, or a pharmaceutically acceptable salt thereof.

[0376] The term “about” as used herein refers to the usual error range for the respective value readily known to the skilled person in this technical field. Reference to “about” a value or parameter herein includes (and describes) embodiments that are directed to that value or parameter per se.

[0377] As used herein, the singular forms “a,” “an,” and “the” include plural referents unless the context clearly dictates otherwise. For example, “a” or “an” means “at least one” or “one or more.”

[0378] Unless defined otherwise, all terms of art, notations and other technical and scientific terms or terminology used herein are intended to have the same meaning as is commonly understood by one of ordinary skill in the art to which the claimed subject matter pertains. In some cases, terms with commonly understood meanings are defined herein for clarity and/or for ready reference, and the inclusion of such definitions herein should not necessarily be construed to represent a substantial difference over what is generally understood in the art. All publications, including patent documents, scientific articles and databases, referred to in this application are incorporated by reference in their entirety for all purposes to the same extent as if each individual publication were individually incorporated by reference. If a definition set forth herein is contrary to or otherwise inconsistent with a definition set forth in the patents, applications, published applications and other publications that are herein incorporated by reference, the definition set forth herein prevails over the definition that is incorporated herein by reference.

[0379] The section headings used herein are for organizational purposes only and are not to be construed as limiting the subject matter described.

### EXAMPLES

[0380] The following examples are provided to further illustrate some embodiments of the present disclosure, but are not intended to limit the scope of the disclosure; it will be understood by their exemplary nature that other procedures, methodologies, or techniques known to those skilled in the art may alternatively be used.

### Example 1: PLN siRNA Design and Evaluation

[0381] A set of siRNAs were designed to target sequences encoding human phospholamban (PLN) (shown here as SEQ ID NO: 2523). A detailed list of the unmodified siRNA sense and antisense strand sequences is shown in Table 1A and Table 1C below. A detailed list of modified siRNAs is shown in Table 1B below. Table 2 provides names for the nucleotide abbreviations used in the nucleic acid sequences herein. Oligonucleotides were chemically synthesized using phosphoramidite approach and after quality control using UV- and mass-spectroscopy sense and antisense strands were annealed to perform screening. Table 3 provides exemplary sequences of PLN mRNA transcripts.

[0382] Human iCell iPSC derived cardiomyocytes were purchased directly from (FujiFilm Cellular Dynamics, R1017) along with associated supplemental thawing and culturing medias. Four days prior to transfection, 96-well tissue culture plates (USA Scientific, CC7682-7596) were coated with 0.1% gelatin for 1 hour at 37° C. iCell cardiomyocytes were thawed according to manufacturer recommendations. Briefly, each vial of cells was thawed in 37° C. water bath and transferred to a 50 mL centrifuge tube. The interior of the cryovial was then rinsed with 1 mL of room temperature Plating Media (FujiFilm) and transferred to the 50 mL tube by adding dropwise to the cells over 90 seconds. An additional 8 mL of Plating Media (per vial of iCell2s) was then added slowly over 60 seconds and mixed through gentle inversion. Cells were then plated on gelatin plates (after aspiration of gelatin) at a density of 50,000 cells/well at 100 μL per well of Plating Media and placed in a tissue culture incubator at 37° C., 5% CO₂. Four hours post plating, the media was carefully aspirated and replaced by 100 μL per well of 37° C. Maintenance Media (FujiFilm) and allowed to incubate as before. Media was carefully aspirated and replaced with fresh Maintenance Media every 48 hours and prior to transfection.

[0383] siRNAs were used as stock solutions in PBS at a concentration of 5 μM each. A layout for transfection was designed and siRNA were transferred to a secondary plate of the same layout. On the day of transfection, iCell media was changed to 80 μL fresh Maintenance Media. Transfection mixes were prepared by adding 5 μL of 5 μM siRNA to 45 μL of fresh OptiMEM® media (ThermoFisher, 31985062) in a v-bottom polypropylene 96 well plate (USA Scientific, 1833-9610). A master mix of Lipofectamine® RNAiMax (ThermoFisher, 13778150) and OptiMEM® media was created at a ratio of 0.3 μL RNAiMax and 10 μL of OptiMEM® per reaction. 50 μL of RNAiMax master mix was added to each 50 μL of siRNA/OptiMEM® and the plate was sealed with sterile plate tape (USA Scientific, 2920-0010). Each transfection mix plate was then rotated at 400 rpm for 5 minutes, then removed and allowed to sit at room temperature in the tissue culture hood for 15 minutes. Following incubation, 20 μL of each siRNA/RNAiMax was added to respective wells of the pre-plated iCell cardiomyocytes, in triplicate. This created a final concentration of 50 nM siRNA per well. At 48 hours post transfection, 50 μL of fresh Maintenance Media was added to the cells for feeding. Transfections were allowed to incubate for 72 hours prior to harvest and RNA isolation. Multiple dose validation screens were performed just as the initial screens with small changes to preparation and final siRNA dosing. Individual siRNA at 5 μM were diluted appropriately into OptiMEM® media to make a highest dose. Serial dilutions were prepared in separate plates horizontally across (60, 20, 6, 2, 0.6, 0.2, 0.06, 0.02, 0.006, 0.002, 0.0006, 0.0002 nM or 3, 1, 0.3, 0.1, 0.03, 0.01, 0.003, 0.001, 0.0003, 0.0001, 0.00003, 0.00001 nM) using fresh OptiMEM®. Just as with the single dose screens, 50 μL of RNAiMax master mix (0.3 μL RNAiMax to 10 μL OptiMEM®) was added to each diluted siRNA. Each plate was then taped, rotated at 400 rpm for 5 minutes, and allowed to incubate at room temperature for 15 minutes. 20 μL of each siRNA reaction was then added to pre-plated iCell2 cardiomyocytes. Transfections were allowed to incubate for 72 hours with a 48-hour feeding of Maintenance Media prior to harvest and RNA isolation.

[0384] 72 hours post transfection, cells were harvested, and RNA was isolated using the Quick-RNA 96 Kit (Zymo Research, R1053) according to the manufacturer protocol using vacuum manifolds for washing and eluting via swing bucket centrifuging at 1500 g. Harvested RNA was assayed for PLN expression via Taqman® qPCR using the Luna Universal Probe One-Step RT-qPCR Kit (NEB, E3006). Untransfected controls from each transfection plate were pooled together and a 1:5 dilution series is produced for each qPCR assay plate for direct normalization. A single qPCR assay was performed for each sample using a PLN Taqman® probe set (Hs00160179_ml-FAM) multiplexed with a common GAPDH VIC probe (ThermoFisher, 4326317E) according to the manufacturer instructions for a combined primer/probe set. Thermocycling and data acquisition was performed with an Applied Biosystems QuantStudio 3/5 Real-Time PCR System.

TABLE 1A
provides exemplary siRNAs with the sequences of the sense strand and the
antisense strand.

| Position in | SEQ ID | | SEQ ID | |
|---|---|---|---|---|
| transcript | NO | Sense strand | NO | Antisense strand |
| 202 | 1 | AAGTCCAATACCTCACTCG | 629 | CGAGTGAGGTATTGGACTT |
| 1209 | 2 | TAGCTTACCATACTATATC | 630 | GATATAGTATGGTAAGCTA |
| 1211 | 3 | GCTTACCATACTATATCTT | 631 | AAGATATAGTATGGTAAGC |
| 1481 | 4 | GACAATTCGTGGGTCCGCA | 632 | TGCGGACCCACGAATTGTC |
| 2424 | 5 | AGATTTCTTAAGTGACGCC | 633 | GGCGTCACTTAAGAAATCT |
| 2430 | 6 | CTTAAGTGACGCCTCATCT | 634 | AGATGAGGCGTCACTTAAG |
| 42 | 7 | CCCGTAAGACTTCATACAA | 635 | TTGTATGAAGTCTTACGGG |
| 219 | 8 | CGCTCAGCTATAAGAAGAG | 636 | CTCTTCTTATAGCTGAGCG |
| 329 | 9 | CTGTATCATCGTGATGCTT | 637 | AAGCATCACGATGATACAG |
| 330 | 10 | TGTATCATCGTGATGCTTC | 638 | GAAGCATCACGATGATACA |
| 1130 | 11 | GTCATATCACTAATATACT | 639 | AGTATATTAGTGATATGAC |
| 1202 | 12 | AGTTACCTAGCTTACCATA | 640 | TATGGTAAGCTAGGTAACT |
| 1503 | 13 | TCTTAACTACCTAATAGCC | 641 | GGCTATTAGGTAGTTAAGA |
| 1504 | 14 | CTTAACTACCTAATAGCCT | 642 | AGGCTATTAGGTAGTTAAG |
| 1900 | 15 | CTCTATCAACCAAATGGTA | 643 | TACCATTTGGTTGATAGAG |
| 1906 | 16 | CAACCAAATGGTAAGCATC | 644 | GATGCTTACCATTTGGTTG |
| 1939 | 17 | CTCTACTGAGCTAAATTAT | 645 | ATAATTTAGCTCAGTAGAG |
| 1940 | 18 | TCTACTGAGCTAAATTATA | 646 | TATAATTTAGCTCAGTAGA |
| 1948 | 19 | GCTAAATTATAGATCCAGC | 647 | GCTGGATCTATAATTTAGC |
| 2301 | 20 | ACACAAGTGTTGCTAACTC | 648 | GAGTTAGCAACACTTGTGT |
| 2309 | 21 | GTTGCTAACTCAATAGTGA | 649 | TCACTATTGAGTTAGCAAC |
| 2425 | 22 | GATTTCTTAAGTGACGCCT | 650 | AGGCGTCACTTAAGAAATC |
| 2429 | 23 | TCTTAAGTGACGCCTCATC | 651 | GATGAGGCGTCACTTAAGA |
| 2431 | 24 | TTAAGTGACGCCTCATCTA | 652 | TAGATGAGGCGTCACTTAA |
| 226 | 25 | CTATAAGAAGAGCCTCAAC | 653 | GTTGAGGCTCTTCTTATAG |
| 227 | 26 | TATAAGAAGAGCCTCAACC | 654 | GGTTGAGGCTCTTCTTATA |
| 228 | 27 | ATAAGAAGAGCCTCAACCA | 655 | TGGTTGAGGCTCTTCTTAT |
| 260 | 28 | ACAAGCACGTCAAAAGCTA | 656 | TAGCTTTTGACGTGCTTGT |
| 276 | 29 | CTACAGAATCTATTTATCA | 657 | TGATAAATAGATTCTGTAG |
| 667 | 30 | AAAACTGCACTGCCAACAA | 658 | TTGTTGGCAGTGCAGTTTT |
| 668 | 31 | AAACTGCACTGCCAACAAG | 659 | CTTGTTGGCAGTGCAGTTT |
| 959 | 32 | TGAGAATCAAGTATGGAAA | 660 | TTTCCATACTTGATTCTCA |
| 1099 | 33 | AACTGGTGGTTAATATGTG | 661 | CACATATTAACCACCAGTT |
| 1100 | 34 | ACTGGTGGTTAATATGTGA | 662 | TCACATATTAACCACCAGT |
| 1590 | 35 | ATTATACACTATATTCCTA | 663 | TAGGAATATAGTGTATAAT |
| 2522 | 36 | GTAAATTACCAATACAGAA | 664 | TTCTGTATTGGTAATTTAC |
| 2576 | 37 | AACTGATTAGTCATATTCC | 665 | GGAATATGACTAATCAGTT |
| 2837 | 38 | ACTATAGAATAAGTTCTTA | 666 | TAAGAACTTATTCTATAGT |
| 225 | 39 | GCTATAAGAAGAGCCTCAA | 667 | TTGAGGCTCTTCTTATAGC |
| 476 | 40 | AAAGGTCAAGATTAAGACT | 668 | AGTCTTAATCTTGACCTTT |
| 477 | 41 | AAGGTCAAGATTAAGACTA | 669 | TAGTCTTAATCTTGACCTT |
| 484 | 42 | AGATTAAGACTAAAACTTA | 670 | TAAGTTTTAGTCTTAATCT |
| 809 | 43 | ACAAATGAAGTGTCATTAT | 671 | ATAATGACACTTCATTTGT |
| 617 | 44 | CTCACAAATTTCTATCCCA | 672 | TGGGATAGAAATTTGTGAG |
| 666 | 45 | TAAAACTGCACTGCCAACA | 673 | TGTTGGCAGTGCAGTTTTA |
| 669 | 46 | AACTGCACTGCCAACAAGT | 674 | ACTTGTTGGCAGTGCAGTT |
| 274 | 47 | AGCTACAGAATCTATTTAT | 675 | ATAAATAGATTCTGTAGCT |
| 275 | 48 | GCTACAGAATCTATTTATC | 676 | GATAAATAGATTCTGTAGC |
| 1098 | 49 | AAAACTTATTGTTACCATA | 677 | TATGGTAACAATAAGTTTT |
| 1101 | 50 | GAACTGGTGGTTAATATGT | 678 | ACATATTAACCACCAGTTC |
| 1413 | 51 | AACTGGTGGTTAATATGTG | 679 | CACATATTAACCACCAGTT |
| 1483 | 52 | ACTGGTGGTTAATATGTGA | 680 | TCACATATTAACCACCAGT |
| 1484 | 53 | CTGGTGGTTAATATGTGAC | 681 | GTCACATATTAACCACCAG |
| 1485 | 54 | ATTCGTGGGTCCGCAAAAT | 682 | ATTTTGCGGACCCACGAAT |
| 1600 | 55 | ATATTCCTACAATAAAGTA | 683 | TACTTTATTGTAGGAATAT |
| 1876 | 56 | AATAGGATATAGCTATTTT | 684 | AAAATAGCTATATCCTATT |
| 1933 | 57 | AGTCCACTCTACTGAGCTA | 685 | TAGCTCAGTAGAGTGGACT |
| 2158 | 58 | ATAATCCAACAATTTTAAT | 686 | ATTAAAATTGTTGGATTAT |
| 2269 | 59 | ATATGTAACATCAATATTG | 687 | CAATATTGATGTTACATAT |
| 2349 | 60 | TGAACCCATGAGAGATACT | 688 | AGTATCTCTCATGGGTTCA |
| 2856 | 61 | TCTTAATTTACAGGGCACT | 689 | AGTGCCCTGTAAATTAAGA |
| 2857 | 62 | CTTAATTTACAGGGCACTA | 690 | TAGTGCCCTGTAAATTAAG |
| 278 | 63 | ACAGAATCTATTTATCAAT | 691 | ATTGATAAATAGATTCTGT |
| 2692 | 64 | TGAGGATTACAGAATACTA | 692 | TAGTATTCTGTAATCCTCA |
| 757 | 65 | TTCTTTAATACTAAGTATT | 693 | AATACTTAGTATTAAAGAA |
| 1379 | 66 | TCTCCAAATATTAACTAAT | 694 | ATTAGTTAATATTTGGAGA |
| 2220 | 67 | TAGAGGATGTGTAATTAAC | 695 | GTTAATTACACATCCTCTA |
| 2102 | 68 | AATTTAAGTTGACTAAAGT | 696 | ACTTTAGTCAACTTAAATT |
| 2690 | 69 | TGTGAGGATTACAGAATAC | 697 | GTATTCTGTAATCCTCACA |
| 52 | 70 | TTCATACAACACAATACTC | 698 | GAGTATTGTGTTGTATGAA |
| 1380 | 71 | CTCCAAATATTAACTAATT | 699 | AATTAGTTAATATTTGGAG |
| 1132 | 72 | CATATCACTAATATACTAA | 700 | TTAGTATATTAGTGATATG |
| 1126 | 73 | ATTAGTCATATCACTAATA | 701 | TATTAGTGATATGACTAAT |
| 281 | 74 | GAATCTATTTATCAATTTC | 702 | GAAATTGATAAATAGATTC |
| 2232 | 75 | AATTAACCATATCTTCTAA | 703 | TTAGAAGATATGGTTAATT |
| 2219 | 76 | GTAGAGGATGTGTAATTAA | 704 | TTAATTACACATCCTCTAC |
| 199 | 77 | AGAAAGTCCAATACCTCAC | 705 | GTGAGGTATTGGACTTTCT |
| 2093 | 78 | AACTTTGGTAATTTAAGTT | 706 | AACTTAAATTACCAAAGTT |
| 1378 | 79 | CTCTCCAAATATTAACTAA | 707 | TTAGTTAATATTTGGAGAG |
| 2840 | 80 | ATAGAATAAGTTCTTATCT | 708 | AGATAAGAACTTATTCTAT |
| 1134 | 81 | TATCACTAATATACTAACA | 709 | TGTTAGTATATTAGTGATA |
| 2222 | 82 | GAGGATGTGTAATTAACCA | 710 | TGGTTAATTACACATCCTC |
| 2703 | 83 | GAATACTATAACTCAAATT | 711 | AATTTGAGTTATAGTATTC |
| 358 | 84 | CTGCTACAACCTCTAGATC | 712 | GATCTAGAGGTTGTAGCAG |
| 285 | 85 | CTATTTATCAATTTCTGTC | 713 | GACAGAAATTGATAAATAG |
| 2184 | 86 | GAAGACATGTTACTAATAT | 714 | ATATTAGTAACATGTCTTC |
| 1377 | 87 | TCTCTCCAAATATTAACTA | 715 | TAGTTAATATTTGGAGAGA |
| 359 | 88 | TGCTACAACCTCTAGATCT | 716 | AGATCTAGAGGTTGTAGCA |
| 194 | 89 | CATGGAGAAAGTCCAATAC | 717 | GTATTGGACTTTCTCCATG |
| 888 | 90 | ACTATCAGAATCTACATTC | 718 | GAATGTAGATTCTGATAGT |
| 193 | 91 | TCATGGAGAAAGTCCAATA | 719 | TATTGGACTTTCTCCATGA |
| 209 | 92 | AUACCUCACUCGCUCAGCA | 720 | UGCUGAGCGAGUGAGGUAU |
| 210 | 93 | UACCUCACUCGCUCAGCUA | 721 | UAGCUGAGCGAGUGAGGUA |
| 211 | 94 | ACCUCACUCGCUCAGCUAA | 722 | UUAGCUGAGCGAGUGAGGU |
| 248 | 95 | UGAAAUGCCUCAACAAGCA | 723 | UGCUUGUUGAGGCAUUUCA |
| 249 | 96 | GAAAUGCCUCAACAAGCAA | 724 | UUGCUUGUUGAGGCAUUUC |
| 250 | 97 | AAAUGCCUCAACAAGCACA | 725 | UGUGCUUGUUGAGGCAUUU |
| 251 | 98 | AAUGCCUCAACAAGCACGA | 726 | UCGUGCUUGUUGAGGCAUU |
| 252 | 99 | AUGCCUCAACAAGCACGUA | 727 | UACGUGCUUGUUGAGGCAU |
| 253 | 100 | UGCCUCAACAAGCACGUCA | 728 | UGACGUGCUUGUUGAGGCA |
| 606 | 101 | CCUCAACAUGGCUCACAAA | 729 | UUUGUGAGCCAUGUUGAGG |
| 607 | 102 | CUCAACAUGGCUCACAAAA | 730 | UUUUGUGAGCCAUGUUGAG |
| 608 | 103 | UCAACAUGGCUCACAAAUA | 731 | UAUUUGUGAGCCAUGUUGA |
| 609 | 104 | CAACAUGGCUCACAAAUUA | 732 | UAAUUUGUGAGCCAUGUUG |
| 203 | 105 | AGUCCAAUACCUCACUCGA | 733 | UCGAGUGAGGUAUUGGACU |
| 204 | 106 | GUCCAAUACCUCACUCGCA | 734 | UGCGAGUGAGGUAUUGGAC |
| 206 | 107 | CCAAUACCUCACUCGCUCA | 735 | UGAGCGAGUGAGGUAUUGG |
| 207 | 108 | CAAUACCUCACUCGCUCAA | 736 | UUGAGCGAGUGAGGUAUUG |
| 223 | 109 | CAGCUAUAAGAAGAGCCUA | 737 | UAGGCUCUUCUUAUAGCUG |
| 230 | 110 | AAGAAGAGCCUCAACCAUA | 738 | UAUGGUUGAGGCUCUUCUU |
| 300 | 111 | UGUCUCAUCUUAAUAUGUA | 739 | UACAUAUUAAGAUGAGACA |
| 301 | 112 | GUCUCAUCUUAAUAUGUCA | 740 | UGACAUAUUAAGAUGAGAC |
| 302 | 113 | UCUCAUCUUAAUAUGUCUA | 741 | UAGACAUAUUAAGAUGAGA |
| 303 | 114 | CUCAUCUUAAUAUGUCUCA | 742 | UGAGACAUAUUAAGAUGAG |
| 306 | 115 | AUCUUAAUAUGUCUCUUGA | 743 | UCAAGAGACAUAUUAAGAU |
| 307 | 116 | UCUUAAUAUGUCUCUUGCA | 744 | UGCAAGAGACAUAUUAAGA |
| 308 | 117 | CUUAAUAUGUCUCUUGCUA | 745 | UAGCAAGAGACAUAUUAAG |
| 309 | 118 | UUAAUAUGUCUCUUGCUGA | 746 | UCAGCAAGAGACAUAUUAA |
| 310 | 119 | UAAUAUGUCUCUUGCUGAA | 747 | UUCAGCAAGAGACAUAUUA |
| 311 | 120 | AAUAUGUCUCUUGCUGAUA | 748 | UAUCAGCAAGAGACAUAUU |
| 312 | 121 | AUAUGUCUCUUGCUGAUCA | 749 | UGAUCAGCAAGAGACAUAU |
| 314 | 122 | AUGUCUCUUGCUGAUCUGA | 750 | UCAGAUCAGCAAGAGACAU |
| 315 | 123 | UGUCUCUUGCUGAUCUGUA | 751 | UACAGAUCAGCAAGAGACA |
| 321 | 124 | UUGCUGAUCUGUAUCAUCA | 752 | UGAUGAUACAGAUCAGCAA |
| 322 | 125 | UGCUGAUCUGUAUCAUCGA | 753 | UCGAUGAUACAGAUCAGCA |
| 323 | 126 | GCUGAUCUGUAUCAUCGUA | 754 | UACGAUGAUACAGAUCAGC |
| 324 | 127 | CUGAUCUGUAUCAUCGUGA | 755 | UCACGAUGAUACAGAUCAG |
| 325 | 128 | UGAUCUGUAUCAUCGUGAA | 756 | UUCACGAUGAUACAGAUCA |
| 326 | 129 | GAUCUGUAUCAUCGUGAUA | 757 | UAUCACGAUGAUACAGAUC |
| 327 | 130 | AUCUGUAUCAUCGUGAUGA | 758 | UCAUCACGAUGAUACAGAU |
| 328 | 131 | UCUGUAUCAUCGUGAUGCA | 759 | UGCAUCACGAUGAUACAGA |
| 331 | 132 | GUAUCAUCGUGAUGCUUCA | 760 | UGAAGCAUCACGAUGAUAC |
| 334 | 133 | UCAUCGUGAUGCUUCUCUA | 761 | UAGAGAAGCAUCACGAUGA |
| 335 | 134 | CAUCGUGAUGCUUCUCUGA | 762 | UCAGAGAAGCAUCACGAUG |
| 336 | 135 | AUCGUGAUGCUUCUCUGAA | 763 | UUCAGAGAAGCAUCACGAU |
| 337 | 136 | UCGUGAUGCUUCUCUGAAA | 764 | UUUCAGAGAAGCAUCACGA |
| 338 | 137 | CGUGAUGCUUCUCUGAAGA | 765 | UCUUCAGAGAAGCAUCACG |
| 349 | 138 | UCUGAAGUUCUGCUACAAA | 766 | UUUGUAGCAGAACUUCAGA |
| 350 | 139 | CUGAAGUUCUGCUACAACA | 767 | UGUUGUAGCAGAACUUCAG |
| 351 | 140 | UGAAGUUCUGCUACAACCA | 768 | UGGUUGUAGCAGAACUUCA |
| 356 | 141 | UUCUGCUACAACCUCUAGA | 769 | UCUAGAGGUUGUAGCAGAA |
| 360 | 142 | GCUACAACCUCUAGAUCUA | 770 | UAGAUCUAGAGGUUGUAGC |
| 399 | 143 | AAAUCUGUCAUCCCAUGCA | 771 | UGCAUGGGAUGACAGAUUU |
| 400 | 144 | AAUCUGUCAUCCCAUGCAA | 772 | UUGCAUGGGAUGACAGAUU |
| 451 | 145 | CCUGAGUAGAAGAGUUUCA | 773 | UGAAACUCUUCUACUCAGG |
| 470 | 146 | UUGUGAAAAGGUCAAGAUA | 774 | UAUCUUGACCUUUUCACAA |
| 471 | 147 | UGUGAAAAGGUCAAGAUUA | 775 | UAAUCUUGACCUUUUCACA |
| 475 | 148 | AAAAGGUCAAGAUUAAGAA | 776 | UUCUUAAUCUUGACCUUUU |
| 478 | 149 | AGGUCAAGAUUAAGACUAA | 777 | UUAGUCUUAAUCUUGACCU |
| 480 | 150 | GUCAAGAUUAAGACUAAAA | 778 | UUUUAGUCUUAAUCUUGAC |
| 481 | 151 | UCAAGAUUAAGACUAAAAA | 779 | UUUUUAGUCUUAAUCUUGA |
| 482 | 152 | CAAGAUUAAGACUAAAACA | 780 | UGUUUUAGUCUUAAUCUUG |
| 483 | 153 | AAGAUUAAGACUAAAACUA | 781 | UAGUUUUAGUCUUAAUCUU |
| 683 | 154 | CAAGUUCACUUCAUAUAUA | 782 | UAUAUAUGAAGUGAACUUG |
| 684 | 155 | AAGUUCACUUCAUAUAUAA | 783 | UUAUAUAUGAAGUGAACUU |
| 715 | 156 | ACUCUUUUGAGGUGAAUAA | 784 | UUAUUCACCUCAAAAGAGU |
| 716 | 157 | CUCUUUUGAGGUGAAUAUA | 785 | UAUAUUCACCUCAAAAGAG |
| 717 | 158 | UCUUUUGAGGUGAAUAUAA | 786 | UUAUAUUCACCUCAAAAGA |
| 786 | 159 | UCACCAAGUAUCAAAGUAA | 787 | UUACUUUGAUACUUGGUGA |
| 788 | 160 | ACCAAGUAUCAAAGUAAUA | 788 | UAUUACUUUGAUACUUGGU |
| 789 | 161 | CCAAGUAUCAAAGUAAUAA | 789 | UUAUUACUUUGAUACUUGG |
| 810 | 162 | CAAAUGAAGUGUCAUUAUA | 790 | UAUAAUGACACUUCAUUUG |
| 811 | 163 | AAAUGAAGUGUCAUUAUUA | 791 | UAAUAAUGACACUUCAUUU |
| 812 | 164 | AAUGAAGUGUCAUUAUUCA | 792 | UGAAUAAUGACACUUCAUU |
| 264 | 165 | GCACGUCAAAAGCUACAGA | 793 | UCUGUAGCUUUUGACGUGC |
| 521 | 166 | AUCUGUUGGAUCUUGUAAA | 794 | UUUACAAGAUCCAACAGAU |
| 522 | 167 | UCUGUUGGAUCUUGUAAAA | 795 | UUUUACAAGAUCCAACAGA |
| 523 | 168 | CUGUUGGAUCUUGUAAACA | 796 | UGUUUACAAGAUCCAACAG |
| 524 | 169 | UGUUGGAUCUUGUAAACAA | 797 | UUGUUUACAAGAUCCAACA |
| 525 | 170 | GUUGGAUCUUGUAAACAUA | 798 | UAUGUUUACAAGAUCCAAC |
| 593 | 171 | CAACUGUUGAUUUCCUCAA | 799 | UUGAGGAAAUCAACAGUUG |
| 610 | 172 | AACAUGGCUCACAAAUUUA | 800 | UAAAUUUGUGAGCCAUGUU |
| 618 | 173 | UCACAAAUUUCUAUCCCAA | 801 | UUGGGAUAGAAAUUUGUGA |
| 623 | 174 | AAUUUCUAUCCCAAAUCUA | 802 | UAGAUUUGGGAUAGAAAUU |
| 624 | 175 | AUUUCUAUCCCAAAUCUUA | 803 | UAAGAUUUGGGAUAGAAAU |
| 718 | 176 | CUUUUGAGGUGAAUAUAAA | 804 | UUUAUAUUCACCUCAAAAG |
| 776 | 177 | UUUCAGGUCUUCACCAAGA | 805 | UCUUGGUGAAGACCUGAAA |
| 777 | 178 | UUCAGGUCUUCACCAAGUA | 806 | UACUUGGUGAAGACCUGAA |
| 778 | 179 | UCAGGUCUUCACCAAGUAA | 807 | UUACUUGGUGAAGACCUGA |
| 779 | 180 | CAGGUCUUCACCAAGUAUA | 808 | UAUACUUGGUGAAGACCUG |
| 780 | 181 | AGGUCUUCACCAAGUAUCA | 809 | UGAUACUUGGUGAAGACCU |
| 813 | 182 | AUGAAGUGUCAUUAUUCAA | 810 | UUGAAUAAUGACACUUCAU |
| 839 | 183 | CACUGACUCCUCACAUCUA | 811 | UAGAUGUGAGGAGUCAGUG |
| 926 | 184 | UUUCUAUGCCACAUUAACA | 812 | UGUUAAUGUGGCAUAGAAA |
| 49 | 185 | GACUUCAUACAACACAAUA | 813 | UAUUGUGUUGUAUGAAGUC |
| 54 | 186 | CAUACAACACAAUACUCUA | 814 | UAGAGUAUUGUGUUGUAUG |
| 55 | 187 | AUACAACACAAUACUCUAA | 815 | UUAGAGUAUUGUGUUGUAU |
| 109 | 188 | GAAGACAGUUAUCUCAUAA | 816 | UUAUGAGAUAACUGUCUUC |
| 110 | 189 | AAGACAGUUAUCUCAUAUA | 817 | UAUAUGAGAUAACUGUCUU |
| 113 | 190 | ACAGUUAUCUCAUAUUUGA | 818 | UCAAAUAUGAGAUAACUGU |
| 115 | 191 | AGUUAUCUCAUAUUUGGCA | 819 | UGCCAAAUAUGAGAUAACU |
| 195 | 192 | AUGGAGAAAGUCCAAUACA | 820 | UGUAUUGGACUUUCUCCAU |
| 231 | 193 | AGAAGAGCCUCAACCAUUA | 821 | UAAUGGUUGAGGCUCUUCU |
| 232 | 194 | GAAGAGCCUCAACCAUUGA | 822 | UCAAUGGUUGAGGCUCUUC |
| 233 | 195 | AAGAGCCUCAACCAUUGAA | 823 | UUCAAUGGUUGAGGCUCUU |
| 234 | 196 | AGAGCCUCAACCAUUGAAA | 824 | UUUCAAUGGUUGAGGCUCU |
| 237 | 197 | GCCUCAACCAUUGAAAUGA | 825 | UCAUUUCAAUGGUUGAGGC |
| 240 | 198 | UCAACCAUUGAAAUGCCUA | 826 | UAGGCAUUUCAAUGGUUGA |
| 244 | 199 | CCAUUGAAAUGCCUCAACA | 827 | UGUUGAGGCAUUUCAAUGG |
| 296 | 200 | UUUCUGUCUCAUCUUAAUA | 828 | UAUUAAGAUGAGACAGAAA |
| 304 | 201 | UCAUCUUAAUAUGUCUCUA | 829 | UAGAGACAUAUUAAGAUGA |
| 305 | 202 | CAUCUUAAUAUGUCUCUUA | 830 | UAAGAGACAUAUUAAGAUG |
| 316 | 203 | GUCUCUUGCUGAUCUGUAA | 831 | UUACAGAUCAGCAAGAGAC |
| 317 | 204 | UCUCUUGCUGAUCUGUAUA | 832 | UAUACAGAUCAGCAAGAGA |
| 318 | 205 | CUCUUGCUGAUCUGUAUCA | 833 | UGAUACAGAUCAGCAAGAG |
| 319 | 206 | UCUUGCUGAUCUGUAUCAA | 834 | UUGAUACAGAUCAGCAAGA |
| 320 | 207 | CUUGCUGAUCUGUAUCAUA | 835 | UAUGAUACAGAUCAGCAAG |
| 341 | 208 | GAUGCUUCUCUGAAGUUCA | 836 | UGAACUUCAGAGAAGCAUC |
| 342 | 209 | AUGCUUCUCUGAAGUUCUA | 837 | UAGAACUUCAGAGAAGCAU |
| 347 | 210 | UCUCUGAAGUUCUGCUACA | 838 | UGUAGCAGAACUUCAGAGA |
| 352 | 211 | GAAGUUCUGCUACAACCUA | 839 | UAGGUUGUAGCAGAACUUC |
| 362 | 212 | UACAACCUCUAGAUCUGCA | 840 | UGCAGAUCUAGAGGUUGUA |
| 402 | 213 | UCUGUCAUCCCAUGCAGAA | 841 | UUCUGCAUGGGAUGACAGA |
| 446 | 214 | CACUUCCUGAGUAGAAGAA | 842 | UUCUUCUACUCAGGAAGUG |
| 450 | 215 | UCCUGAGUAGAAGAGUUUA | 843 | UAAACUCUUCUACUCAGGA |
| 452 | 216 | CUGAGUAGAAGAGUUUCUA | 844 | UAGAAACUCUUCUACUCAG |
| 479 | 217 | GGUCAAGAUUAAGACUAAA | 845 | UUUAGUCUUAAUCUUGACC |
| 528 | 218 | GGAUCUUGUAAACAUGAAA | 846 | UUUCAUGUUUACAAGAUCC |
| 595 | 219 | ACUGUUGAUUUCCUCAACA | 847 | UGUUGAGGAAAUCAACAGU |
| 598 | 220 | GUUGAUUUCCUCAACAUGA | 848 | UCAUGUUGAGGAAAUCAAC |
| 600 | 221 | UGAUUUCCUCAACAUGGCA | 849 | UGCCAUGUUGAGGAAAUCA |
| 601 | 222 | GAUUUCCUCAACAUGGCUA | 850 | UAGCCAUGUUGAGGAAAUC |
| 602 | 223 | AUUUCCUCAACAUGGCUCA | 851 | UGAGCCAUGUUGAGGAAAU |
| 604 | 224 | UUCCUCAACAUGGCUCACA | 852 | UGUGAGCCAUGUUGAGGAA |
| 605 | 225 | UCCUCAACAUGGCUCACAA | 853 | UUGUGAGCCAUGUUGAGGA |
| 671 | 226 | CUGCACUGCCAACAAGUUA | 854 | UAACUUGUUGGCAGUGCAG |
| 672 | 227 | UGCACUGCCAACAAGUUCA | 855 | UGAACUUGUUGGCAGUGCA |
| 674 | 228 | CACUGCCAACAAGUUCACA | 856 | UGUGAACUUGUUGGCAGUG |
| 675 | 229 | ACUGCCAACAAGUUCACUA | 857 | UAGUGAACUUGUUGGCAGU |
| 676 | 230 | CUGCCAACAAGUUCACUUA | 858 | UAAGUGAACUUGUUGGCAG |
| 679 | 231 | CCAACAAGUUCACUUCAUA | 859 | UAUGAAGUGAACUUGUUGG |
| 680 | 232 | CAACAAGUUCACUUCAUAA | 860 | UUAUGAAGUGAACUUGUUG |
| 681 | 233 | AACAAGUUCACUUCAUAUA | 861 | UAUAUGAAGUGAACUUGUU |
| 682 | 234 | ACAAGUUCACUUCAUAUAA | 862 | UUAUAUGAAGUGAACUUGU |
| 690 | 235 | ACUUCAUAUAUAAAGCAUA | 863 | UAUGCUUUAUAUAUGAAGU |
| 782 | 236 | GUCUUCACCAAGUAUCAAA | 864 | UUUGAUACUUGGUGAAGAC |
| 783 | 237 | UCUUCACCAAGUAUCAAAA | 865 | UUUUGAUACUUGGUGAAGA |
| 784 | 238 | CUUCACCAAGUAUCAAAGA | 866 | UCUUUGAUACUUGGUGAAG |
| 785 | 239 | UUCACCAAGUAUCAAAGUA | 867 | UACUUUGAUACUUGGUGAA |
| 787 | 240 | CACCAAGUAUCAAAGUAAA | 868 | UUUACUUUGAUACUUGGUG |
| 790 | 241 | CAAGUAUCAAAGUAAUAAA | 869 | UUUAUUACUUUGAUACUUG |
| 791 | 242 | AAGUAUCAAAGUAAUAACA | 870 | UGUUAUUACUUUGAUACUU |
| 792 | 243 | AGUAUCAAAGUAAUAACAA | 871 | UUGUUAUUACUUUGAUACU |
| 803 | 244 | AAUAACACAAAUGAAGUGA | 872 | UCACUUCAUUUGUGUUAUU |
| 838 | 245 | CCACUGACUCCUCACAUCA | 873 | UGAUGUGAGGAGUCAGUGG |
| 848 | 246 | CUCACAUCUGUUAUCUUAA | 874 | UUAAGAUAACAGAUGUGAG |
| 849 | 247 | UCACAUCUGUUAUCUUAUA | 875 | UAUAAGAUAACAGAUGUGA |
| 850 | 248 | CACAUCUGUUAUCUUAUUA | 876 | UAAUAAGAUAACAGAUGUG |
| 872 | 249 | AGAACUAUUUGUAGUAACA | 877 | UGUUACUACAAAUAGUUCU |
| 873 | 250 | GAACUAUUUGUAGUAACUA | 878 | UAGUUACUACAAAUAGUUC |
| 876 | 251 | CUAUUUGUAGUAACUAUCA | 879 | UGAUAGUUACUACAAAUAG |
| 877 | 252 | UAUUUGUAGUAACUAUCAA | 880 | UUGAUAGUUACUACAAAUA |
| 878 | 253 | AUUUGUAGUAACUAUCAGA | 881 | UCUGAUAGUUACUACAAAU |
| 882 | 254 | GUAGUAACUAUCAGAAUCA | 882 | UGAUUCUGAUAGUUACUAC |
| 883 | 255 | UAGUAACUAUCAGAAUCUA | 883 | UAGAUUCUGAUAGUUACUA |
| 886 | 256 | UAACUAUCAGAAUCUACAA | 884 | UUGUAGAUUCUGAUAGUUA |
| 889 | 257 | CUAUCAGAAUCUACAUUCA | 885 | UGAAUGUAGAUUCUGAUAG |
| 950 | 258 | UAAAGUUGAUGAGAAUCAA | 886 | UUGAUUCUCAUCAACUUUA |
| 951 | 259 | AAAGUUGAUGAGAAUCAAA | 887 | UUUGAUUCUCAUCAACUUU |
| 952 | 260 | AAGUUGAUGAGAAUCAAGA | 888 | UCUUGAUUCUCAUCAACUU |
| 953 | 261 | AGUUGAUGAGAAUCAAGUA | 889 | UACUUGAUUCUCAUCAACU |
| 978 | 262 | AGUAAGGCCAUACUCUUAA | 890 | UUAAGAGUAUGGCCUUACU |
| 979 | 263 | GUAAGGCCAUACUCUUACA | 891 | UGUAAGAGUAUGGCCUUAC |
| 980 | 264 | UAAGGCCAUACUCUUACAA | 892 | UUGUAAGAGUAUGGCCUUA |
| 983 | 265 | GGCCAUACUCUUACAUAAA | 893 | UUUAUGUAAGAGUAUGGCC |
| 984 | 266 | GCCAUACUCUUACAUAAUA | 894 | UAUUAUGUAAGAGUAUGGC |
| 1066 | 267 | AAUCUGUUCUAAGACAUAA | 895 | UUAUGUCUUAGAACAGAUU |
| 1068 | 268 | UCUGUUCUAAGACAUAUGA | 896 | UCAUAUGUCUUAGAACAGA |
| 1071 | 269 | GUUCUAAGACAUAUGAUCA | 897 | UGAUCAUAUGUCUUAGAAC |
| 1072 | 270 | UUCUAAGACAUAUGAUCAA | 898 | UUGAUCAUAUGUCUUAGAA |
| 1073 | 271 | UCUAAGACAUAUGAUCAAA | 899 | UUUGAUCAUAUGUCUUAGA |
| 1077 | 272 | AGACAUAUGAUCAACAGAA | 900 | UUCUGUUGAUCAUAUGUCU |
| 1078 | 273 | GACAUAUGAUCAACAGAUA | 901 | UAUCUGUUGAUCAUAUGUC |
| 1079 | 274 | ACAUAUGAUCAACAGAUGA | 902 | UCAUCUGUUGAUCAUAUGU |
| 1082 | 275 | UAUGAUCAACAGAUGAGAA | 903 | UUCUCAUCUGUUGAUCAUA |
| 1083 | 276 | AUGAUCAACAGAUGAGAAA | 904 | UUUCUCAUCUGUUGAUCAU |
| 1118 | 277 | ACAGUGAGAUUAGUCAUAA | 905 | UUAUGACUAAUCUCACUGU |
| 1119 | 278 | CAGUGAGAUUAGUCAUAUA | 906 | UAUAUGACUAAUCUCACUG |
| 1121 | 279 | GUGAGAUUAGUCAUAUCAA | 907 | UUGAUAUGACUAAUCUCAC |
| 1205 | 280 | UACCUAGCUUACCAUACUA | 908 | UAGUAUGGUAAGCUAGGUA |
| 1206 | 281 | ACCUAGCUUACCAUACUAA | 909 | UUAGUAUGGUAAGCUAGGU |
| 1207 | 282 | CCUAGCUUACCAUACUAUA | 910 | UAUAGUAUGGUAAGCUAGG |
| 1208 | 283 | CUAGCUUACCAUACUAUAA | 911 | UUAUAGUAUGGUAAGCUAG |
| 1210 | 284 | AGCUUACCAUACUAUAUCA | 912 | UGAUAUAGUAUGGUAAGCU |
| 1375 | 285 | UCUCUCUCCAAAUAUUAAA | 913 | UUUAAUAUUUGGAGAGAGA |
| 1417 | 286 | AUGAACUUGUUGGCCCAUA | 914 | UAUGGGCCAACAAGUUCAU |
| 1418 | 287 | UGAACUUGUUGGCCCAUCA | 915 | UGAUGGGCCAACAAGUUCA |
| 1419 | 288 | GAACUUGUUGGCCCAUCUA | 916 | UAGAUGGGCCAACAAGUUC |
| 1420 | 289 | AACUUGUUGGCCCAUCUAA | 917 | UUAGAUGGGCCAACAAGUU |
| 1422 | 290 | CUUGUUGGCCCAUCUAUUA | 918 | UAAUAGAUGGGCCAACAAG |
| 1424 | 291 | UGUUGGCCCAUCUAUUACA | 919 | UGUAAUAGAUGGGCCAACA |
| 1956 | 292 | AUAGAUCCAGCUAUGCUAA | 920 | UUAGCAUAGCUGGAUCUAU |
| 1957 | 293 | UAGAUCCAGCUAUGCUAUA | 921 | UAUAGCAUAGCUGGAUCUA |
| 1958 | 294 | AGAUCCAGCUAUGCUAUUA | 922 | UAAUAGCAUAGCUGGAUCU |
| 2025 | 295 | UCAGAACAUCUUCCAAUAA | 923 | UUAUUGGAAGAUGUUCUGA |
| 2030 | 296 | ACAUCUUCCAAUAACUCAA | 924 | UUGAGUUAUUGGAAGAUGU |
| 2087 | 297 | UCACCAAACUUUGGUAAUA | 925 | UAUUACCAAAGUUUGGUGA |
| 2088 | 298 | CACCAAACUUUGGUAAUUA | 926 | UAAUUACCAAAGUUUGGUG |
| 2094 | 299 | ACUUUGGUAAUUUAAGUUA | 927 | UAACUUAAAUUACCAAAGU |
| 2099 | 300 | GGUAAUUUAAGUUGACUAA | 928 | UUAGUCAACUUAAAUUACC |
| 2145 | 301 | ACACCUAUACUGCAUAAUA | 929 | UAUUAUGCAGUAUAGGUGU |
| 2146 | 302 | CACCUAUACUGCAUAAUCA | 930 | UGAUUAUGCAGUAUAGGUG |
| 2147 | 303 | ACCUAUACUGCAUAAUCCA | 931 | UGGAUUAUGCAGUAUAGGU |
| 2148 | 304 | CCUAUACUGCAUAAUCCAA | 932 | UUGGAUUAUGCAGUAUAGG |
| 2150 | 305 | UAUACUGCAUAAUCCAACA | 933 | UGUUGGAUUAUGCAGUAUA |
| 2151 | 306 | AUACUGCAUAAUCCAACAA | 934 | UUGUUGGAUUAUGCAGUAU |
| 2152 | 307 | UACUGCAUAAUCCAACAAA | 935 | UUUGUUGGAUUAUGCAGUA |
| 2153 | 308 | ACUGCAUAAUCCAACAAUA | 936 | UAUUGUUGGAUUAUGCAGU |
| 2182 | 309 | UUGAAGACAUGUUACUAAA | 937 | UUUAGUAACAUGUCUUCAA |
| 2183 | 310 | UGAAGACAUGUUACUAAUA | 938 | UAUUAGUAACAUGUCUUCA |
| 2188 | 311 | ACAUGUUACUAAUAUAACA | 939 | UGUUAUAUUAGUAACAUGU |
| 2216 | 312 | AGAGUAGAGGAUGUGUAAA | 940 | UUUACACAUCCUCUACUCU |
| 2228 | 313 | GUGUAAUUAACCAUAUCUA | 941 | UAGAUAUGGUUAAUUACAC |
| 2281 | 314 | AAUAUUGACCUUGGUUUCA | 942 | UGAAACCAAGGUCAAUAUU |
| 2282 | 315 | AUAUUGACCUUGGUUUCUA | 943 | UAGAAACCAAGGUCAAUAU |
| 2284 | 316 | AUUGACCUUGGUUUCUUAA | 944 | UUAAGAAACCAAGGUCAAU |
| 2288 | 317 | ACCUUGGUUUCUUACACAA | 945 | UUGUGUAAGAAACCAAGGU |
| 2293 | 318 | GGUUUCUUACACAAGUGUA | 946 | UACACUUGUGUAAGAAACC |
| 2295 | 319 | UUUCUUACACAAGUGUUGA | 947 | UCAACACUUGUGUAAGAAA |
| 2297 | 320 | UCUUACACAAGUGUUGCUA | 948 | UAGCAACACUUGUGUAAGA |
| 2303 | 321 | ACAAGUGUUGCUAACUCAA | 949 | UUGAGUUAGCAACACUUGU |
| 2306 | 322 | AGUGUUGCUAACUCAAUAA | 950 | UUAUUGAGUUAGCAACACU |
| 2307 | 323 | GUGUUGCUAACUCAAUAGA | 951 | UCUAUUGAGUUAGCAACAC |
| 2308 | 324 | UGUUGCUAACUCAAUAGUA | 952 | UACUAUUGAGUUAGCAACA |
| 2310 | 325 | UUGCUAACUCAAUAGUGAA | 953 | UUCACUAUUGAGUUAGCAA |
| 2311 | 326 | UGCUAACUCAAUAGUGAAA | 954 | UUUCACUAUUGAGUUAGCA |
| 2315 | 327 | AACUCAAUAGUGAAGGAGA | 955 | UCUCCUUCACUAUUGAGUU |
| 2317 | 328 | CUCAAUAGUGAAGGAGACA | 956 | UGUCUCCUUCACUAUUGAG |
| 2380 | 329 | UGGAAAGUGUUUGGUUCAA | 957 | UUGAACCAAACACUUUCCA |
| 2389 | 330 | UUUGGUUCAGGGAUAUCUA | 958 | UAGAUAUCCCUGAACCAAA |
| 2390 | 331 | UUGGUUCAGGGAUAUCUGA | 959 | UCAGAUAUCCCUGAACCAA |
| 2420 | 332 | GCAGAGAUUUCUUAAGUGA | 960 | UCACUUAAGAAAUCUCUGC |
| 2432 | 333 | UAAGUGACGCCUCAUCUAA | 961 | UUAGAUGAGGCGUCACUUA |
| 2434 | 334 | AGUGACGCCUCAUCUACAA | 962 | UUGUAGAUGAGGCGUCACU |
| 2437 | 335 | GACGCCUCAUCUACAAGCA | 963 | UGCUUGUAGAUGAGGCGUC |
| 2443 | 336 | UCAUCUACAAGCUGGAAAA | 964 | UUUUCCAGCUUGUAGAUGA |
| 2601 | 337 | UACACUGUUUGUUACAAUA | 965 | UAUUGUAACAAACAGUGUA |
| 2681 | 338 | AUCUUAUUCUGUGAGGAUA | 966 | UAUCCUCACAGAAUAAGAU |
| 2697 | 339 | AUUACAGAAUACUAUAACA | 967 | UGUUAUAGUAUUCUGUAAU |
| 2700 | 340 | ACAGAAUACUAUAACUCAA | 968 | UUGAGUUAUAGUAUUCUGU |
| 2947 | 341 | AAAUCAGAAUCACUAUAUA | 969 | UAUAUAGUGAUUCUGAUUU |
| 17 | 342 | AGUCAGAAAACUCCCCAGA | 970 | UCUGGGGAGUUUUCUGACU |
| 18 | 343 | GUCAGAAAACUCCCCAGCA | 971 | UGCUGGGGAGUUUUCUGAC |
| 19 | 344 | UCAGAAAACUCCCCAGCUA | 972 | UAGCUGGGGAGUUUUCUGA |
| 20 | 345 | CAGAAAACUCCCCAGCUAA | 973 | UUAGCUGGGGAGUUUUCUG |
| 21 | 346 | AGAAAACUCCCCAGCUAAA | 974 | UUUAGCUGGGGAGUUUUCU |
| 45 | 347 | GUAAGACUUCAUACAACAA | 975 | UUGUUGUAUGAAGUCUUAC |
| 47 | 348 | AAGACUUCAUACAACACAA | 976 | UUGUGUUGUAUGAAGUCUU |
| 48 | 349 | AGACUUCAUACAACACAAA | 977 | UUUGUGUUGUAUGAAGUCU |
| 91 | 350 | UGCCAAGGCUACCUAAAAA | 978 | UUUUUAGGUAGCCUUGGCA |
| 94 | 351 | CAAGGCUACCUAAAAGAAA | 979 | UUUCUUUUAGGUAGCCUUG |
| 95 | 352 | AAGGCUACCUAAAAGAAGA | 980 | UCUUCUUUUAGGUAGCCUU |
| 96 | 353 | AGGCUACCUAAAAGAAGAA | 981 | UUCUUCUUUUAGGUAGCCU |
| 97 | 354 | GGCUACCUAAAAGAAGACA | 982 | UGUCUUCUUUUAGGUAGCC |
| 98 | 355 | GCUACCUAAAAGAAGACAA | 983 | UUGUCUUCUUUUAGGUAGC |
| 99 | 356 | CUACCUAAAAGAAGACAGA | 984 | UCUGUCUUCUUUUAGGUAG |
| 100 | 357 | UACCUAAAAGAAGACAGUA | 985 | UACUGUCUUCUUUUAGGUA |
| 101 | 358 | ACCUAAAAGAAGACAGUUA | 986 | UAACUGUCUUCUUUUAGGU |
| 102 | 359 | CCUAAAAGAAGACAGUUAA | 987 | UUAACUGUCUUCUUUUAGG |
| 103 | 360 | CUAAAAGAAGACAGUUAUA | 988 | UAUAACUGUCUUCUUUUAG |
| 104 | 361 | UAAAAGAAGACAGUUAUCA | 989 | UGAUAACUGUCUUCUUUUA |
| 105 | 362 | AAAAGAAGACAGUUAUCUA | 990 | UAGAUAACUGUCUUCUUUU |
| 106 | 363 | AAAGAAGACAGUUAUCUCA | 991 | UGAGAUAACUGUCUUCUUU |
| 107 | 364 | AAGAAGACAGUUAUCUCAA | 992 | UUGAGAUAACUGUCUUCUU |
| 108 | 365 | AGAAGACAGUUAUCUCAUA | 993 | UAUGAGAUAACUGUCUUCU |
| 111 | 366 | AGACAGUUAUCUCAUAUUA | 994 | UAAUAUGAGAUAACUGUCU |
| 112 | 367 | GACAGUUAUCUCAUAUUUA | 995 | UAAAUAUGAGAUAACUGUC |
| 114 | 368 | CAGUUAUCUCAUAUUUGGA | 996 | UCCAAAUAUGAGAUAACUG |
| 161 | 369 | CUUAAAACUUCAGACUUCA | 997 | UGAAGUCUGAAGUUUUAAG |
| 163 | 370 | UAAAACUUCAGACUUCCUA | 998 | UAGGAAGUCUGAAGUUUUA |
| 181 | 371 | GUCCUGCUGGUAUCAUGGA | 999 | UCCAUGAUACCAGCAGGAC |
| 182 | 372 | UCCUGCUGGUAUCAUGGAA | 1000 | UUCCAUGAUACCAGCAGGA |
| 183 | 373 | CCUGCUGGUAUCAUGGAGA | 1001 | UCUCCAUGAUACCAGCAGG |
| 184 | 374 | CUGCUGGUAUCAUGGAGAA | 1002 | UUCUCCAUGAUACCAGCAG |
| 185 | 375 | UGCUGGUAUCAUGGAGAAA | 1003 | UUUCUCCAUGAUACCAGCA |
| 186 | 376 | GCUGGUAUCAUGGAGAAAA | 1004 | UUUUCUCCAUGAUACCAGC |
| 187 | 377 | CUGGUAUCAUGGAGAAAGA | 1005 | UCUUUCUCCAUGAUACCAG |
| 188 | 378 | UGGUAUCAUGGAGAAAGUA | 1006 | UACUUUCUCCAUGAUACCA |
| 189 | 379 | GGUAUCAUGGAGAAAGUCA | 1007 | UGACUUUCUCCAUGAUACC |
| 197 | 380 | GGAGAAAGUCCAAUACCUA | 1008 | UAGGUAUUGGACUUUCUCC |
| 198 | 381 | GAGAAAGUCCAAUACCUCA | 1009 | UGAGGUAUUGGACUUUCUC |
| 200 | 382 | GAAAGUCCAAUACCUCACA | 1010 | UGUGAGGUAUUGGACUUUC |
| 201 | 383 | AAAGUCCAAUACCUCACUA | 1011 | UAGUGAGGUAUUGGACUUU |
| 205 | 384 | UCCAAUACCUCACUCGCUA | 1012 | UAGCGAGUGAGGUAUUGGA |
| 212 | 385 | CCUCACUCGCUCAGCUAUA | 1013 | UAUAGCUGAGCGAGUGAGG |
| 213 | 386 | CUCACUCGCUCAGCUAUAA | 1014 | UUAUAGCUGAGCGAGUGAG |
| 214 | 387 | UCACUCGCUCAGCUAUAAA | 1015 | UUUAUAGCUGAGCGAGUGA |
| 215 | 388 | CACUCGCUCAGCUAUAAGA | 1016 | UCUUAUAGCUGAGCGAGUG |
| 217 | 389 | CUCGCUCAGCUAUAAGAAA | 1017 | UUUCUUAUAGCUGAGCGAG |
| 221 | 390 | CUCAGCUAUAAGAAGAGCA | 1018 | UGCUCUUCUUAUAGCUGAG |
| 222 | 391 | UCAGCUAUAAGAAGAGCCA | 1019 | UGGCUCUUCUUAUAGCUGA |
| 224 | 392 | AGCUAUAAGAAGAGCCUCA | 1020 | UGAGGCUCUUCUUAUAGCU |
| 229 | 393 | UAAGAAGAGCCUCAACCAA | 1021 | UUGGUUGAGGCUCUUCUUA |
| 254 | 394 | GCCUCAACAAGCACGUCAA | 1022 | UUGACGUGCUUGUUGAGGC |
| 255 | 395 | CCUCAACAAGCACGUCAAA | 1023 | UUUGACGUGCUUGUUGAGG |
| 256 | 396 | CUCAACAAGCACGUCAAAA | 1024 | UUUUGACGUGCUUGUUGAG |
| 257 | 397 | UCAACAAGCACGUCAAAAA | 1025 | UUUUUGACGUGCUUGUUGA |
| 290 | 398 | UAUCAAUUUCUGUCUCAUA | 1026 | UAUGAGACAGAAAUUGAUA |
| 291 | 399 | AUCAAUUUCUGUCUCAUCA | 1027 | UGAUGAGACAGAAAUUGAU |
| 292 | 400 | UCAAUUUCUGUCUCAUCUA | 1028 | UAGAUGAGACAGAAAUUGA |
| 293 | 401 | CAAUUUCUGUCUCAUCUUA | 1029 | UAAGAUGAGACAGAAAUUG |
| 297 | 402 | UUCUGUCUCAUCUUAAUAA | 1030 | UUAUUAAGAUGAGACAGAA |
| 298 | 403 | UCUGUCUCAUCUUAAUAUA | 1031 | UAUAUUAAGAUGAGACAGA |
| 299 | 404 | CUGUCUCAUCUUAAUAUGA | 1032 | UCAUAUUAAGAUGAGACAG |
| 313 | 405 | UAUGUCUCUUGCUGAUCUA | 1033 | UAGAUCAGCAAGAGACAUA |
| 346 | 406 | UUCUCUGAAGUUCUGCUAA | 1034 | UUAGCAGAACUUCAGAGAA |
| 348 | 407 | CUCUGAAGUUCUGCUACAA | 1035 | UUGUAGCAGAACUUCAGAG |
| 353 | 408 | AAGUUCUGCUACAACCUCA | 1036 | UGAGGUUGUAGCAGAACUU |
| 354 | 409 | AGUUCUGCUACAACCUCUA | 1037 | UAGAGGUUGUAGCAGAACU |
| 355 | 410 | GUUCUGCUACAACCUCUAA | 1038 | UUAGAGGUUGUAGCAGAAC |
| 357 | 411 | UCUGCUACAACCUCUAGAA | 1039 | UUCUAGAGGUUGUAGCAGA |
| 361 | 412 | CUACAACCUCUAGAUCUGA | 1040 | UCAGAUCUAGAGGUUGUAG |
| 363 | 413 | ACAACCUCUAGAUCUGCAA | 1041 | UUGCAGAUCUAGAGGUUGU |
| 381 | 414 | GCUUGCCACAUCAGCUUAA | 1042 | UUAAGCUGAUGUGGCAAGC |
| 382 | 415 | CUUGCCACAUCAGCUUAAA | 1043 | UUUAAGCUGAUGUGGCAAG |
| 383 | 416 | UUGCCACAUCAGCUUAAAA | 1044 | UUUUAAGCUGAUGUGGCAA |
| 387 | 417 | CACAUCAGCUUAAAAUCUA | 1045 | UAGAUUUUAAGCUGAUGUG |
| 388 | 418 | ACAUCAGCUUAAAAUCUGA | 1046 | UCAGAUUUUAAGCUGAUGU |
| 389 | 419 | CAUCAGCUUAAAAUCUGUA | 1047 | UACAGAUUUUAAGCUGAUG |
| 390 | 420 | AUCAGCUUAAAAUCUGUCA | 1048 | UGACAGAUUUUAAGCUGAU |
| 391 | 421 | UCAGCUUAAAAUCUGUCAA | 1049 | UUGACAGAUUUUAAGCUGA |
| 392 | 422 | CAGCUUAAAAUCUGUCAUA | 1050 | UAUGACAGAUUUUAAGCUG |
| 393 | 423 | AGCUUAAAAUCUGUCAUCA | 1051 | UGAUGACAGAUUUUAAGCU |
| 394 | 424 | GCUUAAAAUCUGUCAUCCA | 1052 | UGGAUGACAGAUUUUAAGC |
| 438 | 425 | UAACAGACCACUUCCUGAA | 1053 | UUCAGGAAGUGGUCUGUUA |
| 440 | 426 | ACAGACCACUUCCUGAGUA | 1054 | UACUCAGGAAGUGGUCUGU |
| 441 | 427 | CAGACCACUUCCUGAGUAA | 1055 | UUACUCAGGAAGUGGUCUG |
| 442 | 428 | AGACCACUUCCUGAGUAGA | 1056 | UCUACUCAGGAAGUGGUCU |
| 443 | 429 | GACCACUUCCUGAGUAGAA | 1057 | UUCUACUCAGGAAGUGGUC |
| 449 | 430 | UUCCUGAGUAGAAGAGUUA | 1058 | UAACUCUUCUACUCAGGAA |
| 469 | 431 | UUUGUGAAAAGGUCAAGAA | 1059 | UUCUUGACCUUUUCACAAA |
| 472 | 432 | GUGAAAAGGUCAAGAUUAA | 1060 | UUAAUCUUGACCUUUUCAC |
| 473 | 433 | UGAAAAGGUCAAGAUUAAA | 1061 | UUUAAUCUUGACCUUUUCA |
| 474 | 434 | GAAAAGGUCAAGAUUAAGA | 1062 | UCUUAAUCUUGACCUUUUC |
| 526 | 435 | UUGGAUCUUGUAAACAUGA | 1063 | UCAUGUUUACAAGAUCCAA |
| 527 | 436 | UGGAUCUUGUAAACAUGAA | 1064 | UUCAUGUUUACAAGAUCCA |
| 531 | 437 | UCUUGUAAACAUGAAAAGA | 1065 | UCUUUUCAUGUUUACAAGA |
| 532 | 438 | CUUGUAAACAUGAAAAGGA | 1066 | UCCUUUUCAUGUUUACAAG |
| 533 | 439 | UUGUAAACAUGAAAAGGGA | 1067 | UCCCUUUUCAUGUUUACAA |
| 537 | 440 | AAACAUGAAAAGGGCUUUA | 1068 | UAAAGCCCUUUUCAUGUUU |
| 538 | 441 | AACAUGAAAAGGGCUUUAA | 1069 | UUAAAGCCCUUUUCAUGUU |
| 628 | 442 | CUAUCCCAAAUCUUUUCUA | 1070 | UAGAAAAGAUUUGGGAUAG |
| 630 | 443 | AUCCCAAAUCUUUUCUGAA | 1071 | UUCAGAAAAGAUUUGGGAU |
| 631 | 444 | UCCCAAAUCUUUUCUGAAA | 1072 | UUUCAGAAAAGAUUUGGGA |
| 639 | 445 | CUUUUCUGAAGAUGAAGAA | 1073 | UUCUUCAUCUUCAGAAAAG |
| 640 | 446 | UUUUCUGAAGAUGAAGAGA | 1074 | UCUCUUCAUCUUCAGAAAA |
| 641 | 447 | UUUCUGAAGAUGAAGAGUA | 1075 | UACUCUUCAUCUUCAGAAA |
| 642 | 448 | UUCUGAAGAUGAAGAGUUA | 1076 | UAACUCUUCAUCUUCAGAA |
| 643 | 449 | UCUGAAGAUGAAGAGUUUA | 1077 | UAAACUCUUCAUCUUCAGA |
| 644 | 450 | CUGAAGAUGAAGAGUUUAA | 1078 | UUAAACUCUUCAUCUUCAG |
| 645 | 451 | UGAAGAUGAAGAGUUUAGA | 1079 | UCUAAACUCUUCAUCUUCA |
| 646 | 452 | GAAGAUGAAGAGUUUAGUA | 1080 | UACUAAACUCUUCAUCUUC |
| 670 | 453 | ACUGCACUGCCAACAAGUA | 1081 | UACUUGUUGGCAGUGCAGU |
| 673 | 454 | GCACUGCCAACAAGUUCAA | 1082 | UUGAACUUGUUGGCAGUGC |
| 677 | 455 | UGCCAACAAGUUCACUUCA | 1083 | UGAAGUGAACUUGUUGGCA |
| 687 | 456 | UUCACUUCAUAUAUAAAGA | 1084 | UCUUUAUAUAUGAAGUGAA |
| 688 | 457 | UCACUUCAUAUAUAAAGCA | 1085 | UGCUUUAUAUAUGAAGUGA |
| 689 | 458 | CACUUCAUAUAUAAAGCAA | 1086 | UUGCUUUAUAUAUGAAGUG |
| 711 | 459 | UUUUACUCUUUUGAGGUGA | 1087 | UCACCUCAAAAGAGUAAAA |
| 712 | 460 | UUUACUCUUUUGAGGUGAA | 1088 | UUCACCUCAAAAGAGUAAA |
| 713 | 461 | UUACUCUUUUGAGGUGAAA | 1089 | UUUCACCUCAAAAGAGUAA |
| 714 | 462 | UACUCUUUUGAGGUGAAUA | 1090 | UAUUCACCUCAAAAGAGUA |
| 781 | 463 | GGUCUUCACCAAGUAUCAA | 1091 | UUGAUACUUGGUGAAGACC |
| 793 | 464 | GUAUCAAAGUAAUAACACA | 1092 | UGUGUUAUUACUUUGAUAC |
| 797 | 465 | CAAAGUAAUAACACAAAUA | 1093 | UAUUUGUGUUAUUACUUUG |
| 800 | 466 | AGUAAUAACACAAAUGAAA | 1094 | UUUCAUUUGUGUUAUUACU |
| 842 | 467 | UGACUCCUCACAUCUGUUA | 1095 | UAACAGAUGUGAGGAGUCA |
| 844 | 468 | ACUCCUCACAUCUGUUAUA | 1096 | UAUAACAGAUGUGAGGAGU |
| 845 | 469 | CUCCUCACAUCUGUUAUCA | 1097 | UGAUAACAGAUGUGAGGAG |
| 846 | 470 | UCCUCACAUCUGUUAUCUA | 1098 | UAGAUAACAGAUGUGAGGA |
| 928 | 471 | UCUAUGCCACAUUAACAUA | 1099 | UAUGUUAAUGUGGCAUAGA |
| 949 | 472 | UUAAAGUUGAUGAGAAUCA | 1100 | UGAUUCUCAUCAACUUUAA |
| 957 | 473 | GAUGAGAAUCAAGUAUGGA | 1101 | UCCAUACUUGAUUCUCAUC |
| 958 | 474 | AUGAGAAUCAAGUAUGGAA | 1102 | UUCCAUACUUGAUUCUCAU |
| 960 | 475 | GAGAAUCAAGUAUGGAAAA | 1103 | UUUUCCAUACUUGAUUCUC |
| 961 | 476 | AGAAUCAAGUAUGGAAAAA | 1104 | UUUUUCCAUACUUGAUUCU |
| 962 | 477 | GAAUCAAGUAUGGAAAAGA | 1105 | UCUUUUCCAUACUUGAUUC |
| 963 | 478 | AAUCAAGUAUGGAAAAGUA | 1106 | UACUUUUCCAUACUUGAUU |
| 964 | 479 | AUCAAGUAUGGAAAAGUAA | 1107 | UUACUUUUCCAUACUUGAU |
| 965 | 480 | UCAAGUAUGGAAAAGUAAA | 1108 | UUUACUUUUCCAUACUUGA |
| 966 | 481 | CAAGUAUGGAAAAGUAAGA | 1109 | UCUUACUUUUCCAUACUUG |
| 967 | 482 | AAGUAUGGAAAAGUAAGGA | 1110 | UCCUUACUUUUCCAUACUU |
| 968 | 483 | AGUAUGGAAAAGUAAGGCA | 1111 | UGCCUUACUUUUCCAUACU |
| 969 | 484 | GUAUGGAAAAGUAAGGCCA | 1112 | UGGCCUUACUUUUCCAUAC |
| 972 | 485 | UGGAAAAGUAAGGCCAUAA | 1113 | UAUGGCCUUACUUUUCCA |
| 981 | 486 | AAGGCCAUACUCUUACAUA | 1114 | UAUGUAAGAGUAUGGCCUU |
| 985 | 487 | CCAUACUCUUACAUAAUAA | 1115 | UUAUUAUGUAAGAGUAUGG |
| 1022 | 488 | UUUUCAAAGAAUCACAGAA | 1116 | UUCUGUGAUUCUUUGAAAA |
| 1023 | 489 | UUUCAAAGAAUCACAGAAA | 1117 | UUUCUGUGAUUCUUUGAAA |
| 1024 | 490 | UUCAAAGAAUCACAGAAUA | 1118 | UAUUCUGUGAUUCUUUGAA |
| 1031 | 491 | AAUCACAGAAUUCUAGUAA | 1119 | UUACUAGAAUUCUGUGAUU |
| 1032 | 492 | AUCACAGAAUUCUAGUACA | 1120 | UGUACUAGAAUUCUGUGAU |
| 1061 | 493 | UCAUAAAUCUGUUCUAAGA | 1121 | UCUUAGAACAGAUUUAUGA |
| 1062 | 494 | CAUAAAUCUGUUCUAAGAA | 1122 | UUCUUAGAACAGAUUUAUG |
| 1063 | 495 | AUAAAUCUGUUCUAAGACA | 1123 | UGUCUUAGAACAGAUUUAU |
| 1064 | 496 | UAAAUCUGUUCUAAGACAA | 1124 | UUGUCUUAGAACAGAUUUA |
| 1067 | 497 | AUCUGUUCUAAGACAUAUA | 1125 | UAUAUGUCUUAGAACAGAU |
| 1069 | 498 | CUGUUCUAAGACAUAUGAA | 1126 | UUCAUAUGUCUUAGAACAG |
| 1070 | 499 | UGUUCUAAGACAUAUGAUA | 1127 | UAUCAUAUGUCUUAGAACA |
| 1074 | 500 | CUAAGACAUAUGAUCAACA | 1128 | UGUUGAUCAUAUGUCUUAG |
| 1075 | 501 | UAAGACAUAUGAUCAACAA | 1129 | UUGUUGAUCAUAUGUCUUA |
| 1080 | 502 | CAUAUGAUCAACAGAUGAA | 1130 | UUCAUCUGUUGAUCAUAUG |
| 1081 | 503 | AUAUGAUCAACAGAUGAGA | 1131 | UCUCAUCUGUUGAUCAUAU |
| 1084 | 504 | UGAUCAACAGAUGAGAACA | 1132 | UGUUCUCAUCUGUUGAUCA |
| 1086 | 505 | AUCAACAGAUGAGAACUGA | 1133 | UCAGUUCUCAUCUGUUGAU |
| 1087 | 506 | UCAACAGAUGAGAACUGGA | 1134 | UCCAGUUCUCAUCUGUUGA |
| 1120 | 507 | AGUGAGAUUAGUCAUAUCA | 1135 | UGAUAUGACUAAUCUCACU |
| 1122 | 508 | UGAGAUUAGUCAUAUCACA | 1136 | UGUGAUAUGACUAAUCUCA |
| 1136 | 509 | UCACUAAUAUACUAACAAA | 1137 | UUUGUUAGUAUAUUAGUGA |
| 1178 | 510 | ACUGUAGUGAAUUAUCUGA | 1138 | UCAGAUAAUUCACUACAGU |
| 1179 | 511 | CUGUAGUGAAUUAUCUGAA | 1139 | UUCAGAUAAUUCACUACAG |
| 1231 | 512 | GGAAUCAUGAAACCUUAAA | 1140 | UUUAAGGUUUCAUGAUUCC |
| 1232 | 513 | GAAUCAUGAAACCUUAAGA | 1141 | UCUUAAGGUUUCAUGAUUC |
| 1233 | 514 | AAUCAUGAAACCUUAAGAA | 1142 | UUCUUAAGGUUUCAUGAUU |
| 1234 | 515 | AUCAUGAAACCUUAAGACA | 1143 | UGUCUUAAGGUUUCAUGAU |
| 1235 | 516 | UCAUGAAACCUUAAGACUA | 1144 | UAGUCUUAAGGUUUCAUGA |
| 1236 | 517 | CAUGAAACCUUAAGACUUA | 1145 | UAAGUCUUAAGGUUUCAUG |
| 1239 | 518 | GAAACCUUAAGACUUCAGA | 1146 | UCUGAAGUCUUAAGGUUUC |
| 1240 | 519 | AAACCUUAAGACUUCAGAA | 1147 | UUCUGAAGUCUUAAGGUUU |
| 1266 | 520 | GCAGGUUGUCUUCCAUUCA | 1148 | UGAAUGGAAGACAACCUGC |
| 1267 | 521 | CAGGUUGUCUUCCAUUCCA | 1149 | UGGAAUGGAAGACAACCUG |
| 1268 | 522 | AGGUUGUCUUCCAUUCCAA | 1150 | UUGGAAUGGAAGACAACCU |
| 1286 | 523 | GCCUAACAUCCAAUGCAGA | 1151 | UCUGCAUUGGAUGUUAGGC |
| 1287 | 524 | CCUAACAUCCAAUGCAGGA | 1152 | UCCUGCAUUGGAUGUUAGG |
| 1288 | 525 | CUAACAUCCAAUGCAGGCA | 1153 | UGCCUGCAUUGGAUGUUAG |
| 1289 | 526 | UAACAUCCAAUGCAGGCAA | 1154 | UUGCCUGCAUUGGAUGUUA |
| 1290 | 527 | AACAUCCAAUGCAGGCAAA | 1155 | UUUGCCUGCAUUGGAUGUU |
| 1291 | 528 | ACAUCCAAUGCAGGCAAGA | 1156 | UCUUGCCUGCAUUGGAUGU |
| 1292 | 529 | CAUCCAAUGCAGGCAAGGA | 1157 | UCCUUGCCUGCAUUGGAUG |
| 1293 | 530 | AUCCAAUGCAGGCAAGGAA | 1158 | UUCCUUGCCUGCAUUGGAU |
| 1294 | 531 | UCCAAUGCAGGCAAGGAAA | 1159 | UUUCCUUGCCUGCAUUGGA |
| 1295 | 532 | CCAAUGCAGGCAAGGAAAA | 1160 | UUUUCCUUGCCUGCAUUGG |
| 1296 | 533 | CAAUGCAGGCAAGGAAAAA | 1161 | UUUUUCCUUGCCUGCAUUG |
| 1297 | 534 | AAUGCAGGCAAGGAAAAUA | 1162 | UAUUUUCCUUGCCUGCAUU |
| 1304 | 535 | GCAAGGAAAAUAAAAGAUA | 1163 | UAUCUUUUAUUUUCCUUGC |
| 1312 | 536 | AAUAAAAGAUUUCCAGUGA | 1164 | UCACUGGAAAUCUUUUAUU |
| 1313 | 537 | AUAAAAGAUUUCCAGUGAA | 1165 | UUCACUGGAAAUCUUUUAU |
| 1314 | 538 | UAAAAGAUUUCCAGUGACA | 1166 | UGUCACUGGAAAUCUUUUA |
| 1315 | 539 | AAAAGAUUUCCAGUGACAA | 1167 | UUGUCACUGGAAAUCUUUU |
| 1366 | 540 | UAUAUGAAUUCUCUCUCCA | 1168 | UGGAGAGAGAAUUCAUAUA |
| 1367 | 541 | AUAUGAAUUCUCUCUCCAA | 1169 | UUGGAGAGAGAAUUCAUAU |
| 1368 | 542 | UAUGAAUUCUCUCUCCAAA | 1170 | UUUGGAGAGAGAAUUCAUA |
| 1369 | 543 | AUGAAUUCUCUCUCCAAAA | 1171 | UUUUGGAGAGAGAAUUCAU |
| 1370 | 544 | UGAAUUCUCUCUCCAAAUA | 1172 | UAUUUGGAGAGAGAAUUCA |
| 1371 | 545 | GAAUUCUCUCUCCAAAUAA | 1173 | UUAUUUGGAGAGAGAAUUC |
| 1372 | 546 | AAUUCUCUCUCCAAAUAUA | 1174 | UAUAUUUGGAGAGAGAAUU |
| 1373 | 547 | AUUCUCUCUCCAAAUAUUA | 1175 | UAAUAUUUGGAGAGAGAAU |
| 1412 | 548 | UUGAAAUGAACUUGUUGGA | 1176 | UCCAACAAGUUCAUUUCAA |
| 1414 | 549 | GAAAUGAACUUGUUGGCCA | 1177 | UGGCCAACAAGUUCAUUUC |
| 1415 | 550 | AAAUGAACUUGUUGGCCCA | 1178 | UGGGCCAACAAGUUCAUUU |
| 1416 | 551 | AAUGAACUUGUUGGCCCAA | 1179 | UUGGGCCAACAAGUUCAUU |
| 1421 | 552 | ACUUGUUGGCCCAUCUAUA | 1180 | UAUAGAUGGGCCAACAAGU |
| 1423 | 553 | UUGUUGGCCCAUCUAUUAA | 1181 | UUAAUAGAUGGGCCAACAA |
| 1426 | 554 | UUGGCCCAUCUAUUACAUA | 1182 | UAUGUAAUAGAUGGGCCAA |
| 1430 | 555 | CCCAUCUAUUACAUCUACA | 1183 | UGUAGAUGUAAUAGAUGGG |
| 1431 | 556 | CCAUCUAUUACAUCUACAA | 1184 | UUGUAGAUGUAAUAGAUGG |
| 1432 | 557 | CAUCUAUUACAUCUACAGA | 1185 | UCUGUAGAUGUAAUAGAUG |
| 1433 | 558 | AUCUAUUACAUCUACAGCA | 1186 | UGCUGUAGAUGUAAUAGAU |
| 1434 | 559 | UCUAUUACAUCUACAGCUA | 1187 | UAGCUGUAGAUGUAAUAGA |
| 1435 | 560 | CUAUUACAUCUACAGCUGA | 1188 | UCAGCUGUAGAUGUAAUAG |
| 1436 | 561 | UAUUACAUCUACAGCUGAA | 1189 | UUCAGCUGUAGAUGUAAUA |
| 1437 | 562 | AUUACAUCUACAGCUGACA | 1190 | UGUCAGCUGUAGAUGUAAU |
| 1438 | 563 | UUACAUCUACAGCUGACCA | 1191 | UGGUCAGCUGUAGAUGUAA |
| 1439 | 564 | UACAUCUACAGCUGACCCA | 1192 | UGGGUCAGCUGUAGAUGUA |
| 1440 | 565 | ACAUCUACAGCUGACCCUA | 1193 | UAGGGUCAGCUGUAGAUGU |
| 1441 | 566 | CAUCUACAGCUGACCCUUA | 1194 | UAAGGGUCAGCUGUAGAUG |
| 1442 | 567 | AUCUACAGCUGACCCUUGA | 1195 | UCAAGGGUCAGCUGUAGAU |
| 1466 | 568 | GGGGUUAGGGGAGCUGACA | 1196 | UGUCAGCUCCCCUAACCCC |
| 1467 | 569 | GGGUUAGGGGAGCUGACAA | 1197 | UUGUCAGCUCCCCUAACCC |
| 1468 | 570 | GGUUAGGGGAGCUGACAAA | 1198 | UUUGUCAGCUCCCCUAACC |
| 1469 | 571 | GUUAGGGGAGCUGACAAUA | 1199 | UAUUGUCAGCUCCCCUAAC |
| 1498 | 572 | CAAAAUCUUAACUACCUAA | 1200 | UUAGGUAGUUAAGAUUUUG |
| 1501 | 573 | AAUCUUAACUACCUAAUAA | 1201 | UUAUUAGGUAGUUAAGAUU |
| 1502 | 574 | AUCUUAACUACCUAAUAGA | 1202 | UCUAUUAGGUAGUUAAGAU |
| 1505 | 575 | UUAACUACCUAAUAGCCUA | 1203 | UAGGCUAUUAGGUAGUUAA |
| 1506 | 576 | UAACUACCUAAUAGCCUAA | 1204 | UUAGGCUAUUAGGUAGUUA |
| 1508 | 577 | ACUACCUAAUAGCCUACUA | 1205 | UAGUAGGCUAUUAGGUAGU |
| 1526 | 578 | AUUGACCAUAAACCUUACA | 1206 | UGUAAGGUUUAUGGUCAAU |
| 1527 | 579 | UUGACCAUAAACCUUACUA | 1207 | UAGUAAGGUUUAUGGUCAA |
| 1528 | 580 | UGACCAUAAACCUUACUGA | 1208 | UCAGUAAGGUUUAUGGUCA |
| 1529 | 581 | GACCAUAAACCUUACUGAA | 1209 | UUCAGUAAGGUUUAUGGUC |
| 1530 | 582 | ACCAUAAACCUUACUGAUA | 1210 | UAUCAGUAAGGUUUAUGGU |
| 1531 | 583 | CCAUAAACCUUACUGAUAA | 1211 | UUAUCAGUAAGGUUUAUGG |
| 1532 | 584 | CAUAAACCUUACUGAUAAA | 1212 | UUUAUCAGUAAGGUUUAUG |
| 1533 | 585 | AUAAACCUUACUGAUAACA | 1213 | UGUUAUCAGUAAGGUUUAU |
| 1543 | 586 | CUGAUAACAUAAACAGUAA | 1214 | UUACUGUUUAUGUUAUCAG |
| 1674 | 587 | UCAUUAAAUGGAAGUGGGA | 1215 | UCCCACUUCCAUUUAAUGA |
| 1675 | 588 | CAUUAAAUGGAAGUGGGUA | 1216 | UACCCACUUCCAUUUAAUG |
| 1706 | 589 | UUCAUUCUCAUUGUCUUCA | 1217 | UGAAGACAAUGAGAAUGAA |
| 1707 | 590 | UCAUUCUCAUUGUCUUCAA | 1218 | UUGAAGACAAUGAGAAUGA |
| 1708 | 591 | CAUUCUCAUUGUCUUCACA | 1219 | UGUGAAGACAAUGAGAAUG |
| 1711 | 592 | UCUCAUUGUCUUCACAUUA | 1220 | UAAUGUGAAGACAAUGAGA |
| 1782 | 593 | GUCUUGUCUUAGGGGUGUA | 1221 | UACACCCCUAAGACAAGAC |
| 1783 | 594 | UCUUGUCUUAGGGGUGUGA | 1222 | UCACACCCCUAAGACAAGA |
| 1817 | 595 | AUAUUCAUGUAUAAGUGGA | 1223 | UCCACUUAUACAUGAAUAU |
| 1822 | 596 | CAUGUAUAAGUGGACCCUA | 1224 | UAGGGUCCACUUAUACAUG |
| 2000 | 597 | AUUUUCAAUUUCUCCUCUA | 1225 | UAGAGGAGAAAUUGAAAAU |
| 2001 | 598 | UUUUCAAUUUCUCCUCUGA | 1226 | UCAGAGGAGAAAUUGAAAA |
| 2002 | 599 | UUUCAAUUUCUCCUCUGAA | 1227 | UUCAGAGGAGAAAUUGAAA |
| 116 | 600 | GTTATCTCATATTTGGCTA | 1228 | UAGCCAAATATGAGATAAC |
| 261 | 601 | CAAGCACGTCAAAAGCTAA | 1229 | UTAGCTTTTGACGTGCTTG |
| 263 | 602 | AGCACGTCAAAAGCTACAA | 1230 | UTGTAGCTTTTGACGTGCT |
| 267 | 603 | CGTCAAAAGCTACAGAATA | 1231 | UATTCTGTAGCTTTTGACG |
| 268 | 604 | GTCAAAAGCTACAGAATCA | 1232 | UGATTCTGTAGCTTTTGAC |
| 534 | 605 | TGTAAACATGAAAAGGGCA | 1233 | UGCCCTTTTCATGTTTACA |
| 535 | 606 | GTAAACATGAAAAGGGCTA | 1234 | UAGCCCTTTTCATGTTTAC |
| 1089 | 607 | AACAGATGAGAACTGGTGA | 1235 | UCACCAGTTCTCATCTGTT |
| 1090 | 608 | ACAGATGAGAACTGGTGGA | 1236 | UCCACCAGTTCTCATCTGT |
| 1091 | 609 | CAGATGAGAACTGGTGGTA | 1237 | UACCACCAGTTCTCATCTG |
| 1092 | 610 | AGATGAGAACTGGTGGTTA | 1238 | UAACCACCAGTTCTCATCT |
| 1093 | 611 | GATGAGAACTGGTGGTTAA | 1239 | UTAACCACCAGTTCTCATC |
| 1094 | 612 | ATGAGAACTGGTGGTTAAA | 1240 | UTTAACCACCAGTTCTCAT |
| 1095 | 613 | TGAGAACTGGTGGTTAATA | 1241 | UATTAACCACCAGTTCTCA |
| 1096 | 614 | GAGAACTGGTGGTTAATAA | 1242 | UTATTAACCACCAGTTCTC |
| 1097 | 615 | AGAACTGGTGGTTAATATA | 1243 | UATATTAACCACCAGTTCT |
| 1228 | 616 | TTTGGAATCATGAAACCTA | 1244 | UAGGTTTCATGATTCCAAA |
| 1229 | 617 | TTGGAATCATGAAACCTTA | 1245 | UAAGGTTTCATGATTCCAA |
| 1614 | 618 | AAGTAAGCTAGAGAAAATA | 1246 | UATTTTCTCTAGCTTACTT |
| 1615 | 619 | AGTAAGCTAGAGAAAATGA | 1247 | UCATTTTCTCTAGCTTACT |
| 1616 | 620 | GTAAGCTAGAGAAAATGTA | 1248 | UACATTTTCTCTAGCTTAC |
| 1673 | 621 | TTCATTAAATGGAAGTGGA | 1249 | UCCACTTCCATTTAATGAA |
| 1701 | 622 | AAGTCTTCATTCTCATTGA | 1250 | UCAATGAGAATGAAGACTT |
| 1702 | 623 | AGTCTTCATTCTCATTGTA | 1251 | UACAATGAGAATGAAGACT |
| 1703 | 624 | GTCTTCATTCTCATTGTCA | 1252 | UGACAATGAGAATGAAGAC |
| 1704 | 625 | TCTTCATTCTCATTGTCTA | 1253 | UAGACAATGAGAATGAAGA |
| 1784 | 626 | CTTGTCTTAGGGGTGTGGA | 1254 | UCCACACCCCTAAGACAAG |
| 1818 | 627 | TATTCATGTATAAGTGGAA | 1255 | UTCCACTTATACATGAATA |
| 1821 | 628 | TCATGTATAAGTGGACCCA | 1256 | UGGGTCCACTTATACATGA |

Column 1 shows the beginning position of the target sequence in PLN human # NM_002667.5 (SEQ ID NO: 2523). The target sequence is 19 nucleotide long starting from the beginning position. For example, row 1 shows that the beginning position of the target sequence is 202, which means that the target sequence is the sequence corresponding to positions 202-220 of PLN_human # NM_002667.5 (SEQ ID NO: 2523). The sequences of the sense strands and antisense strands are shown from the 5′ end to the 3′ end.

TABLE 1B
provides exemplary IC50, Knockdown, and Species Selectivity datafor certain
siRNAs comprising modified sense strand and modified antisense strand. Column 1 shows
the beginning position of the target sequence in PLN_human # NM_002667.5 (SEQ ID NO:
2523). The target sequence is 19 nucleotide long starting from the beginning position. For
example, row 1 shows that the beginning position of the target sequence is 202, which means
that the target sequence is the sequence corresponding to positions 202-220 of PLN_human_#
NM_002667.5 (SEQ ID NO: 2523). The sequences of the sense strands and antisense strands are
shown from the 5′ end to the 3′ end.

| Position in | SEQ | | SEQ | | mRNA level | IC50 |
|---|---|---|---|---|---|---|
| transcript | ID NO | Sense strand | ID NO | Antisense strand | % at 50 nM | (nM) |
| 202 | 1257 | asasguCfcAfAfUf | 1885 | csGfsaguGfaGfGfuauu | 65.23 | |
| | | accucacucg | | GfgAfcuususu | | |
| 1209 | 1258 | usasgcUfuAfCfCf | 1886 | gsAfsuauAfgUfAfugguA | 31.97 | |
| | | auacuauauc | | faGfcuasusu | | |
| 1211 | 1259 | gscsuuAfcCfAfUf | 1887 | asAfsgauAfuAfGfuaug | 36.91 | |
| | | acuauaucuu | | GfuAfagcsusu | | |
| 1481 | 1260 | gsascaAfuUfCfGf | 1888 | usGfscggAfcCfCfacgaA | 43.96 | |
| | | uggguccgca | | fuUfgucsusu | | |
| 2424 | 1261 | asgsauUfuCfUfUf | 1889 | gsGfscguCfaCfUfuaag | 78.95 | |
| | | aagugacgcc | | AfaAfucususu | | |
| 2430 | 1262 | csusuaAfgUfGfAf | 1890 | asGfsaugAfgGfCfguca | 83.94 | |
| | | cgccucaucu | | CfuUfaagsusu | | |
| 42 | 1263 | cscscgUfaAfGfAf | 1891 | usUfsguaUfgAfAfgucu | 6.70 | |
| | | cuucauacaa | | UfaCfgggsusu | | |
| 219 | 1264 | csgscuCfaGfCfUf | 1892 | csUfscuuCfuUfAfuagc | 20.86 | |
| | | auaagaagag | | UfgAfgcgsusu | | |
| 329 | 1265 | csusguAfuCfAfUf | 1893 | asAfsgcaUfcAfCfgaugA | 46.65 | |
| | | cgugaugcuu | | fuAfcagsusu | | |
| 330 | 1266 | usgsuaUfcAfUfCf | 1894 | gsAfsagcAfuCfAfcgauG | 98.95 | |
| | | gugaugcuuc | | faUfacasusu | | |
| 1130 | 1267 | gsuscaUfaUfCfAf | 1895 | asGfsuauAfuUfAfguga | 112.98 | |
| | | cuaauauacu | | UfaUfgacsusu | | |
| 1202 | 1268 | asgsuuAfcCfUfAf | 1896 | usAfsuggUfaAfGfcuag | 78.61 | |
| | | gcuuaccaua | | GfuAfacususu | | |
| 1503 | 1269 | uscsuuAfaCfUfAf | 1897 | gsGfscuaUfuAfGfguag | 39.33 | |
| | | ccuaauagcc | | UfuAfagasusu | | |
| 1504 | 1270 | csusuaAfcUfAfCf | 1898 | asGfsgcuAfuUfAfggua | 37.17 | |
| | | cuaauagccu | | GfuUfaagsusu | | |
| 1900 | 1271 | csuscuAfuCfAfAf | 1899 | usAfsccaUfuUfGfguug | 69.16 | |
| | | ccaaauggua | | AfuAfgagsusu | | |
| 1906 | 1272 | csasacCfaAfAfUf | 1900 | gsAfsugcUfuAfCfcauu | 63.34 | |
| | | gguaagcauc | | UfgGfuugsusu | | |
| 1939 | 1273 | csuscuAfcUfGfAf | 1901 | asUfsaauUfuAfGfcuca | 74.15 | |
| | | gcuaaauuau | | GfuAfgagsusu | | |
| 1940 | 1274 | uscsuaCfuGfAfGf | 1902 | usAfsuaaUfuUfAfgcucA | 75.80 | |
| | | cuaaauuaua | | fgUfagasusu | | |
| 1948 | 1275 | gscsuaAfaUfUfAf | 1903 | gsCfsuggAfuCfUfauaa | 72.80 | |
| | | uagauccagc | | UfuUfagcsusu | | |
| 2301 | 1276 | ascsacAfaGfUfGf | 1904 | gsAfsguuAfgCfAfacacU | 68.69 | |
| | | uugcuaacuc | | fuGfugususu | | |
| 2309 | 1277 | gsusugCfuAfAfCf | 1905 | usCfsacuAfuUfGfaguu | 80.28 | |
| | | ucaauaguga | | AfgCfaacsusu | | |
| 2425 | 1278 | gsasuuUfcUfUfAf | 1906 | asGfsgcgUfcAfCfuuaa | 82.18 | |
| | | agugacgccu | | GfaAfaucsusu | | |
| 2429 | 1279 | uscsuuAfaGfUfGf | 1907 | gsAfsugaGfgCfGfucac | 75.92 | |
| | | acgccucauc | | UfuAfagasusu | | |
| 2431 | 1280 | ususaaGfuGfAfCf | 1908 | usAfsgauGfaGfGfcguc | 77.13 | |
| | | gccucaucua | | AfcUfuaasusu | | |
| 226 | 1281 | csusauAfaGfAfAf | 1909 | gsUfsugaGfgCfUfcuuc | 24.86 | |
| | | gagccucaac | | UfuAfuagsusu | | |
| 227 | 1282 | usasuaAfgAfAfGf | 1910 | gsGfsuugAfgGfCfucuu | 74.25 | |
| | | agccucaacc | | CfuUfauasusu | | |
| 228 | 1283 | asusaaGfaAfGfAf | 1911 | usGfsguuGfaGfGfcucu | 67.88 | |
| | | gccucaacca | | UfcUfuaususu | | |
| 260 | 1284 | ascsaaGfcAfCfGf | 1912 | usAfsgcuUfuUfGfacgu | 20.29 | |
| | | ucaaaagcua | | GfcUfugususu | | |
| 276 | 1285 | csusacAfgAfAfUfc | 1913 | usGfsauaAfaUfAfgauu | 17.45 | |
| | | uauuuauca | | CfuGfuagsusu | | |
| 667 | 1286 | asasaaCfuGfCfAf | 1914 | usUfsguuGfgCfAfgugc | 26.99 | |
| | | cugccaacaa | | AfgUfuuususu | | |
| 668 | 1287 | asasacUfgCfAfCf | 1915 | csUfsuguUfgGfCfagug | 39.83 | |
| | | ugccaacaag | | CfaGfuuususu | | |
| 959 | 1288 | usgsagAfaUfCfAf | 1916 | usUfsuccAfuAfCfuuga | 43.10 | |
| | | aguauggaaa | | UfuCfucasusu | | |
| 1099 | 1289 | asascuGfgUfGfGf | 1917 | csAfscauAfuUfAfaccaC | 46.49 | |
| | | uuaauaugug | | fcAfguususu | | |
| 1100 | 1290 | ascsugGfuGfGfUf | 1918 | usCfsacaUfaUfUfaacc | 30.93 | |
| | | uaauauguga | | AfcCfagususu | | |
| 1590 | 1291 | asusuaUfaCfAfCf | 1919 | usAfsggaAfuAfUfagugU | 40.10 | |
| | | uauauuccua | | faUfaaususu | | |
| 2522 | 1292 | gsusaaAfuUfAfCf | 1920 | usUfscugUfaUfUfggua | 75.52 | |
| | | caauacagaa | | AfuUfuacsusu | | |
| 2576 | 1293 | asascuGfaUfUfAf | 1921 | gsGfsaauAfuGfAfcuaa | 75.22 | |
| | | gucauauucc | | UfcAfguususu | | |
| 2837 | 1294 | ascsuaUfaGfAfAf | 1922 | usAfsagaAfcUfUfauuc | 75.82 | |
| | | uaaguucuua | | UfaUfagususu | | |
| 225 | 1295 | gscsuaUfaAfGfAf | 1923 | usUfsgagGfcUfCfuucu | 16.44 | |
| | | agagccucaa | | UfaUfagcsusu | | |
| 476 | 1296 | asasagGfuCfAfAf | 1924 | asGfsucuUfaAfUfcuug | 16.66 | |
| | | gauuaagacu | | AfcCfuuususu | | |
| 477 | 1297 | asasggUfcAfAfGf | 1925 | usAfsgucUfuAfAfucuu | 25.21 | |
| | | auuaagacua | | GfaCfcuususu | | |
| 484 | 1298 | asgsauUfaAfGfAf | 1926 | usAfsaguUfuUfAfgucu | 21.69 | |
| | | cuaaaacuua | | UfaAfucususu | | |
| 809 | 1299 | ascsaaAfuGfAfAf | 1927 | asUfsaauGfaCfAfcuuc | 50.33 | |
| | | gugucauuau | | AfuUfugususu | | |
| 617 | 1300 | csuscaCfaAfAfUf | 1928 | usGfsggaUfaGfAfaauu | 34.52 | |
| | | uucuauccca | | UfgUfgagsusu | | |
| 666 | 1301 | usasaaAfcUfGfCf | 1929 | usGfsuugGfcAfGfugca | 38.42 | |
| | | acugccaaca | | GfuUfuuasusu | | |
| 669 | 1302 | asascuGfcAfCfUf | 1930 | asCfsuugUfuGfGfcagu | 43.22 | |
| | | gccaacaagu | | GfcAfguususu | | |
| 274 | 1303 | asgscuAfcAfGfAf | 1931 | asUfsaaaUfaGfAfuucu | 19.64 | |
| | | aucuauuuau | | GfuAfgcususu | | |
| 275 | 1304 | gscsuaCfaGfAfAf | 1932 | gsAfsuaaAfuAfGfauuc | 6.59 | |
| | | ucuauuuauc | | UfgUfagcsusu | | |
| 1098 | 1305 | asasaaCfuUfAfUf | 1933 | usAfsuggUfaAfCfaauaA | 14.55 | |
| | | uguuaccaua | | fgUfuuususu | | |
| 1101 | 1306 | gsasacUfgGfUfGf | 1934 | asCfsauaUfuAfAfccac | 47.03 | |
| | | guuaauaugu | | CfaGfuucsusu | | |
| 1413 | 1307 | asascuGfgUfGfGf | 1935 | csAfscauAfuUfAfaccaC | 46.97 | |
| | | uuaauaugug | | fcAfguususu | | |
| 1483 | 1308 | ascsugGfuGfGfUf | 1936 | usCfsacaUfaUfUfaacc | 34.52 | |
| | | uaauauguga | | AfcCfagususu | | |
| 1484 | 1309 | csusggUfgGfUfUf | 1937 | gsUfscacAfuAfUfuaac | 61.54 | |
| | | aauaugugac | | CfaCfcagsusu | | |
| 1485 | 1310 | asusucGfuGfGfGf | 1938 | asUfsuuuGfcGfGfaccc | 35.88 | |
| | | uccgcaaaau | | AfcGfaaususu | | |
| 1600 | 1311 | asusauUfcCfUfAf | 1939 | usAfscuuUfaUfUfguag | 43.99 | |
| | | caauaaagua | | GfaAfuaususu | | |
| 1876 | 1312 | asasuaGfgAfUfAf | 1940 | asAfsaauAfgCfUfauau | 87.40 | |
| | | uagcuauuuu | | CfcUfauususu | | |
| 1933 | 1313 | asgsucCfaCfUfCf | 1941 | usAfsgcuCfaGfUfagag | 80.74 | |
| | | uacugagcua | | UfgGfacususu | | |
| 2158 | 1314 | asusaaUfcCfAfAf | 1942 | asUfsuaaAfaUfUfguug | 82.83 | |
| | | caauuuuaau | | GfaUfuaususu | | |
| 2269 | 1315 | asusauGfuAfAfCf | 1943 | csAfsauaUfuGfAfuguu | 98.34 | |
| | | aucaauauug | | AfcAfuaususu | | |
| 2349 | 1316 | usgsaaCfcCfAfUf | 1944 | asGfsuauCfuCfUfcaug | 72.42 | |
| | | gagagauacu | | GfgUfucasusu | | |
| 2856 | 1317 | uscsuuAfaUfUfUf | 1945 | asGfsugcCfcUfGfuaaa | 75.39 | |
| | | acagggcacu | | UfuAfagasusu | | |
| 2857 | 1318 | csusuaAfuUfUfAf | 1946 | usAfsgugCfcCfUfguaa | 71.79 | |
| | | cagggcacua | | AfuUfaagsusu | | |
| 278 | 1319 | ascsagAfaUfCfUf | 1947 | asUfsugaUfaAfAfuaga | 20.86 | |
| | | auuuaucaau | | UfuCfugususu | | |
| 2692 | 1320 | usgsagGfaUfUfAf | 1948 | usAfsguaUfuCfUfguaa | 80.56 | |
| | | cagaauacua | | UfcCfucasusu | | |
| 757 | 1321 | ususcuUfuAfAfUf | 1949 | asAfsuacUfuAfGfuauu | 48.34 | |
| | | acuaaguauu | | AfaAfgaasusu | | |
| 1379 | 1322 | uscsucCfaAfAfUf | 1950 | asUfsuagUfuAfAfuauu | 43.36 | |
| | | auuaacuaau | | UfgGfagasusu | | |
| 2220 | 1323 | usasgaGfgAfUfGf | 1951 | gsUfsuaaUfuAfCfacau | 84.17 | |
| | | uguaauuaac | | CfcUfcuasusu | | |
| 2102 | 1324 | asasuuUfaAfGfUf | 1952 | asCfsuuuAfgUfCfaacu | 81.56 | |
| | | ugacuaaagu | | UfaAfauususu | | |
| 2690 | 1325 | usgsugAfgGfAfUf | 1953 | gsUfsauuCfuGfUfaauc | 68.42 | |
| | | uacagaauac | | CfuCfacasusu | | |
| 52 | 1326 | ususcaUfaCfAfAf | 1954 | gsAfsguaUfuGfUfguug | 14.61 | |
| | | cacaauacuc | | UfaUfgaasusu | | |
| 1380 | 1327 | csusccAfaAfUfAf | 1955 | asAfsuuaGfuUfAfauau | 38.90 | |
| | | uuaacuaauu | | UfuGfgagsusu | | |
| 1132 | 1328 | csasuaUfcAfCfUf | 1956 | usUfsaguAfuAfUfuagu | 45.45 | |
| | | aauauacuaa | | GfaUfaugsusu | | |
| 1126 | 1329 | asusuaGfuCfAfUf | 1957 | usAfsuuaGfuGfAfuaug | 76.47 | |
| | | aucacuaaua | | AfcUfaaususu | | |
| 281 | 1330 | gsasauCfuAfUfUf | 1958 | gsAfsaauUfgAfUfaaauA | 14.25 | |
| | | uaucaauuuc | | fgAfuucsusu | | |
| 2232 | 1331 | asasuuAfaCfCfAf | 1959 | usUfsagaAfgAfUfauggU | 75.03 | |
| | | uaucuucuaa | | fuAfauususu | | |
| 2219 | 1332 | gsusagAfgGfAfUf | 1960 | usUfsaauUfaCfAfcauc | 75.52 | |
| | | guguaauuaa | | CfuCfuacsusu | | |
| 199 | 1333 | asgsaaAfgUfCfCf | 1961 | gsUfsgagGfuAfUfugga | 37.70 | |
| | | aauaccucac | | CfuUfucususu | | |
| 2093 | 1334 | asascuUfuGfGfUf | 1962 | asAfscuuAfaAfUfuaccA | 112.59 | |
| | | aauuuaaguu | | faAfguususu | | |
| 1378 | 1335 | csuscuCfcAfAfAf | 1963 | usUfsaguUfaAfUfauuu | 40.37 | |
| | | uauuaacuaa | | GfgAfgagsusu | | |
| 2840 | 1336 | asusagAfaUfAfAfg | 1964 | asGfsauaAfgAfAfcuuaU | 75.82 | |
| | | uucuuaucu | | fuCfuaususu | | |
| 1134 | 1337 | usasucAfcUfAfAf | 1965 | usGfsuuaGfuAfUfauua | 100.30 | |
| | | uauacuaaca | | GfuGfauasusu | | |
| 2222 | 1338 | gsasggAfuGfUfGf | 1966 | usGfsguuAfaUfUfacac | 71.03 | |
| | | uaauuaacca | | AfuCfcucsusu | | |
| 2703 | 1339 | gsasauAfcUfAfUf | 1967 | asAfsuuuGfaGfUfuaua | 86.64 | |
| | | aacucaaauu | | GfuAfuucsusu | | |
| 358 | 1340 | csusgcUfaCfAfAf | 1968 | gsAfsucuAfgAfGfguugU | 108.53 | |
| | | ccucuagauc | | faGfcagsusu | | |
| 285 | 1341 | csusauUfuAfUfCf | 1969 | gsAfscagAfaAfUfugauA | 110.13 | |
| | | aauuucuguc | | faAfuagsusu | | |
| 2184 | 1342 | gsasagAfcAfUfGf | 1970 | asUfsauuAfgUfAfacau | 98.95 | |
| | | uuacuaauau | | GfuCfuucsusu | | |
| 1377 | 1343 | uscsucUfcCfAfAf | 1971 | usAfsguuAfaUfAfuuug | 112.58 | |
| | | auauuaacua | | GfaGfagasusu | | |
| 359 | 1344 | usgscuAfcAfAfCf | 1972 | asGfsaucUfaGfAfgguu | 24.14 | |
| | | cucuagaucu | | GfuAfgcasusu | | |
| 194 | 1345 | csasugGfaGfAfAf | 1973 | gsUfsauuGfgAfCfuuuc | 103.75 | |
| | | aguccaauac | | UfcCfaugsusu | | |
| 888 | 1346 | ascsuaUfcAfGfAf | 1974 | gsAfsaugUfaGfAfuucu | 37.58 | |
| | | aucuacauuc | | GfaUfagususu | | |
| 193 | 1347 | uscsauGfgAfGfAf | 1975 | usAfsuugGfaCfUfuucu | 119.63 | |
| | | aaguccaaua | | CfcAfugasusu | | |
| 209 | 1348 | asusacCfuCfAfCf | 1976 | usGfscugAfgCfGfagug | 19.46 | |
| | | ucgcucagca | | AfgGfuaususu | | |
| 210 | 1349 | usasccUfcAfCfUf | 1977 | usAfsgcuGfaGfCfgagu | 30.93 | |
| | | cgcucagcua | | GfaGfguasusu | | |
| 211 | 1350 | ascscuCfaCfUfCf | 1978 | usUfsagcUfgAfGfcgag | 25.70 | |
| | | gcucagcuaa | | UfgAfggususu | | |
| 248 | 1351 | usgsaaAfuGfCfCf | 1979 | usGfscuuGfuUfGfaggc | 9.98 | |
| | | ucaacaagca | | AfuUfucasusu | | |
| 249 | 1352 | gsasaaUfgCfCfUf | 1980 | usUfsgcuUfgUfUfgagg | 9.20 | |
| | | caacaagcaa | | CfaUfuucsusu | | |
| 250 | 1353 | asasauGfcCfUfCf | 1981 | usGfsugcUfuGfUfugag | 26.58 | |
| | | aacaagcaca | | GfcAfuuususu | | |
| 251 | 1354 | asasugCfcUfCfAf | 1982 | usCfsgugCfuUfGfuuga | 24.12 | |
| | | acaagcacga | | GfgCfauususu | | |
| 252 | 1355 | asusgcCfuCfAfAf | 1983 | usAfscguGfcUfUfguug | 21.87 | |
| | | caagcacgua | | AfgGfcaususu | | |
| 253 | 1356 | usgsccUfcAfAfCf | 1984 | usGfsacgUfgCfUfuguu | 41.26 | |
| | | aagcacguca | | GfaGfgcasusu | | |
| 606 | 1357 | cscsucAfaCfAfUf | 1985 | usUfsuguGfaGfCfcaug | 22.54 | |
| | | ggcucacaaa | | UfuGfaggsusu | | |
| 607 | 1358 | csuscaAfcAfUfGf | 1986 | usUfsuugUfgAfGfccau | 42.98 | |
| | | gcucacaaaa | | GfuUfgagsusu | | |
| 608 | 1359 | uscsaaCfaUfGfGf | 1987 | usAfsuuuGfuGfAfgcca | 17.49 | |
| | | cucacaaaua | | UfgUfugasusu | | |
| 609 | 1360 | csasacAfuGfGfCf | 1988 | usAfsauuUfgUfGfagcc | 22.40 | |
| | | ucacaaauua | | AfuGfuugsusu | | |
| 203 | 1361 | asgsucCfaAfUfAf | 1989 | usCfsgagUfgAfGfguau | 13.06 | |
| | | ccucacucga | | UfgGfacususu | | |
| 204 | 1362 | gsusccAfaUfAfCf | 1990 | usGfscgaGfuGfAfggua | 9.32 | |
| | | cucacucgca | | UfuGfgacsusu | | |
| 206 | 1363 | cscsaaUfaCfCfUf | 1991 | usGfsagcGfaGfUfgagg | 13.74 | |
| | | cacucgcuca | | UfaUfuggsusu | | |
| 207 | 1364 | csasauAfcCfUfCf | 1992 | usUfsgagCfgAfGfugag | 17.47 | |
| | | acucgcucaa | | GfuAfuugsusu | | |
| 223 | 1365 | csasgcUfaUfAfAf | 1993 | usAfsggcUfcUfUfcuua | 25.67 | |
| | | gaagagccua | | UfaGfcugsusu | | |
| 230 | 1366 | asasgaAfgAfGfCf | 1994 | usAfsuggUfuGfAfggcu | 7.13 | |
| | | cucaaccaua | | CfuUfcuususu | | |
| 300 | 1367 | usgsucUfcAfUfCf | 1995 | usAfscauAfuUfAfagau | 13.20 | |
| | | uuaauaugua | | GfaGfacasusu | | |
| 301 | 1368 | gsuscuCfaUfCfUf | 1996 | usGfsacaUfaUfUfaaga | 5.31 | |
| | | uaauauguca | | UfgAfgacsusu | | |
| 302 | 1369 | uscsucAfuCfUfUf | 1997 | usAfsgacAfuAfUfuaagA | 58.49 | |
| | | aauaugucua | | fuGfagasusu | | |
| 303 | 1370 | csuscaUfcUfUfAf | 1998 | usGfsagaCfaUfAfuuaa | 43.43 | |
| | | auaugucuca | | GfaUfgagsusu | | |
| 306 | 1371 | asuscuUfaAfUfAf | 1999 | usCfsaagAfgAfCfauau | 10.43 | |
| | | ugucucuuga | | UfaAfgaususu | | |
| 307 | 1372 | uscsuuAfaUfAfUf | 2000 | usGfscaaGfaGfAfcaua | 26.83 | |
| | | gucucuugca | | UfuAfagasusu | | |
| 308 | 1373 | csusuaAfuAfUfGf | 2001 | usAfsgcaAfgAfGfacauA | 17.58 | |
| | | ucucuugcua | | fuUfaagsusu | | |
| 309 | 1374 | ususaaUfaUfGfUf | 2002 | usCfsagcAfaGfAfgaca | 7.96 | |
| | | cucuugcuga | | UfaUfuaasusu | | |
| 310 | 1375 | usasauAfuGfUfCf | 2003 | usUfscagCfaAfGfagac | 10.05 | |
| | | ucuugcugaa | | AfuAfuuasusu | | |
| 311 | 1376 | asasuaUfgUfCfUf | 2004 | usAfsucaGfcAfAfgagaC | 14.83 | |
| | | cuugcugaua | | faUfauususu | | |
| 312 | 1377 | asusauGfuCfUfCf | 2005 | usGfsaucAfgCfAfagagA | 8.29 | |
| | | uugcugauca | | fcAfuaususu | | |
| 314 | 1378 | asusguCfuCfUfUf | 2006 | usCfsagaUfcAfGfcaag | 14.03 | |
| | | gcugaucuga | | AfgAfcaususu | | |
| 315 | 1379 | usgsucUfcUfUfGf | 2007 | usAfscagAfuCfAfgcaaG | 7.80 | |
| | | cugaucugua | | faGfacasusu | | |
| 321 | 1380 | ususgcUfgAfUfCf | 2008 | usGfsaugAfuAfCfagau | 13.01 | |
| | | uguaucauca | | CfaGfcaasusu | | |
| 322 | 1381 | usgscuGfaUfCfUf | 2009 | usCfsgauGfaUfAfcaga | 27.97 | |
| | | guaucaucga | | UfcAfgcasusu | | |
| 323 | 1382 | gscsugAfuCfUfGf | 2010 | usAfscgaUfgAfUfacagA | 11.84 | |
| | | uaucaucgua | | fuCfagcsusu | | |
| 324 | 1383 | csusgaUfcUfGfUf | 2011 | usCfsacgAfuGfAfuaca | 49.29 | |
| | | aucaucguga | | GfaUfcagsusu | | |
| 325 | 1384 | usgsauCfuGfUfAf | 2012 | usUfscacGfaUfGfauac | 21.57 | |
| | | ucaucgugaa | | AfgAfucasusu | | |
| 326 | 1385 | gsasucUfgUfAfUf | 2013 | usAfsucaCfgAfUfgaua | 15.23 | |
| | | caucgugaua | | CfaGfaucsusu | | |
| 327 | 1386 | asuscuGfuAfUfCf | 2014 | usCfsaucAfcGfAfugau | 61.52 | |
| | | aucgugauga | | AfcAfgaususu | | |
| 328 | 1387 | uscsugUfaUfCfAf | 2015 | usGfscauCfaCfGfauga | 31.79 | |
| | | ucgugaugca | | UfaCfagasusu | | |
| 331 | 1388 | gsusauCfaUfCfGf | 2016 | usGfsaagCfaUfCfacga | 4.38 | |
| | | ugaugcuuca | | UfgAfuacsusu | | |
| 334 | 1389 | uscsauCfgUfGfAf | 2017 | usAfsgagAfaGfCfauca | 7.79 | |
| | | ugcuucucua | | CfgAfugasusu | | |
| 335 | 1390 | csasucGfuGfAfUf | 2018 | usCfsagaGfaAfGfcauc | 19.31 | |
| | | gcuucucuga | | AfcGfaugsusu | | |
| 336 | 1391 | asuscgUfgAfUfGf | 2019 | usUfscagAfgAfAfgcauC | 41.61 | |
| | | cuucucugaa | | faCfgaususu | | |
| 337 | 1392 | uscsguGfaUfGfCf | 2020 | usUfsucaGfaGfAfagca | 20.26 | |
| | | uucucugaaa | | UfcAfcgasusu | | |
| 338 | 1393 | csgsugAfuGfCfUf | 2021 | usCfsuucAfgAfGfaagcA | 23.91 | |
| | | ucucugaaga | | fuCfacgsusu | | |
| 349 | 1394 | uscsugAfaGfUfUf | 2022 | usUfsuguAfgCfAfgaacU | 54.86 | |
| | | cugcuacaaa | | fuCfagasusu | | |
| 350 | 1395 | csusgaAfgUfUfCf | 2023 | usGfsuugUfaGfCfagaa | 15.79 | |
| | | ugcuacaaca | | CfuUfcagsusu | | |
| 351 | 1396 | usgsaaGfuUfCfUf | 2024 | usGfsguuGfuAfGfcaga | 31.70 | |
| | | gcuacaacca | | AfcUfucasusu | | |
| 356 | 1397 | ususcuGfcUfAfCf | 2025 | usCfsuagAfgGfUfugua | 64.92 | |
| | | aaccucuaga | | GfcAfgaasusu | | |
| 360 | 1398 | gscsuaCfaAfCfCf | 2026 | usAfsgauCfuAfGfaggu | 5.09 | |
| | | ucuagaucua | | UfgUfagcsusu | | |
| 399 | 1399 | asasauCfuGfUfCf | 2027 | usGfscauGfgGfAfugac | 26.41 | |
| | | aucccaugca | | AfgAfuuususu | | |
| 400 | 1400 | asasucUfgUfCfAf | 2028 | usUfsgcaUfgGfGfauga | 15.50 | |
| | | ucccaugcaa | | CfaGfauususu | | |
| 451 | 1401 | cscsugAfgUfAfGf | 2029 | usGfsaaaCfuCfUfucua | 9.12 | |
| | | aagaguuuca | | CfuCfaggsusu | | |
| 470 | 1402 | ususguGfaAfAfAf | 2030 | usAfsucuUfgAfCfcuuu | 7.11 | |
| | | ggucaagaua | | UfcAfcaasusu | | |
| 471 | 1403 | usgsugAfaAfAfGfg | 2031 | usAfsaucUfuGfAfccuu | 6.80 | |
| | | ucaagauua | | UfuCfacasusu | | |
| 475 | 1404 | asasaaGfgUfCfAf | 2032 | usUfscuuAfaUfCfuuga | 8.77 | |
| | | agauuaagaa | | CfcUfuuususu | | |
| 478 | 1405 | asgsguCfaAfGfAf | 2033 | usUfsaguCfuUfAfaucu | 7.32 | |
| | | uuaagacuaa | | UfgAfccususu | | |
| 480 | 1406 | gsuscaAfgAfUfUf | 2034 | usUfsuuaGfuCfUfuaau | 7.86 | |
| | | aagacuaaaa | | CfuUfgacsusu | | |
| 481 | 1407 | uscsaaGfaUfUfAf | 2035 | usUfsuuuAfgUfCfuuaa | 12.43 | |
| | | agacuaaaaa | | UfcUfugasusu | | |
| 482 | 1408 | csasagAfuUfAfAfg | 2036 | usGfsuuuUfaGfUfcuua | 18.50 | |
| | | acuaaaaca | | AfuCfuugsusu | | |
| 483 | 1409 | asasgaUfuAfAfGf | 2037 | usAfsguuUfuAfGfucuu | 15.38 | |
| | | acuaaaacua | | AfaUfcuususu | | |
| 683 | 1410 | csasagUfuCfAfCf | 2038 | usAfsuauAfuGfAfagugA | 31.18 | |
| | | uucauauaua | | faCfuugsusu | | |
| 684 | 1411 | asasguUfcAfCfUf | 2039 | usUfsauaUfaUfGfaagu | 25.45 | |
| | | ucauauauaa | | GfaAfcuususu | | |
| 715 | 1412 | ascsucUfuUfUfGf | 2040 | usUfsauuCfaCfCfucaa | 16.80 | |
| | | aggugaauaa | | AfaGfagususu | | |
| 716 | 1413 | csuscuUfuUfGfAf | 2041 | usAfsuauUfcAfCfcuca | 23.25 | |
| | | ggugaauaua | | AfaAfgagsusu | | |
| 717 | 1414 | uscsuuUfuGfAfGf | 2042 | usUfsauaUfuCfAfccuc | 25.44 | |
| | | gugaauauaa | | AfaAfagasusu | | |
| 786 | 1415 | uscsacCfaAfGfUf | 2043 | usUfsacuUfuGfAfuacu | 25.53 | |
| | | aucaaaguaa | | UfgGfugasusu | | |
| 788 | 1416 | ascscaAfgUfAfUf | 2044 | usAfsuuaCfuUfUfgaua | 36.86 | |
| | | caaaguaaua | | CfuUfggususu | | |
| 789 | 1417 | cscsaaGfuAfUfCf | 2045 | usUfsauuAfcUfUfugau | 28.62 | |
| | | aaaguaauaa | | AfcUfuggsusu | | |
| 810 | 1418 | csasaaUfgAfAfGf | 2046 | usAfsuaaUfgAfCfacuu | 31.63 | |
| | | ugucauuaua | | CfaUfuugsusu | | |
| 811 | 1419 | asasauGfaAfGfUf | 2047 | usAfsauaAfuGfAfcacu | 33.58 | |
| | | gucauuauua | | UfcAfuuususu | | |
| 812 | 1420 | asasugAfaGfUfGf | 2048 | usGfsaauAfaUfGfacac | 19.89 | |
| | | ucauuauuca | | UfuCfauususu | | |
| 264 | 1421 | gscsacGfuCfAfAf | 2049 | usCfsuguAfgCfUfuuug | 11.50 | |
| | | aagcuacaga | | AfcGfugcsusu | | |
| 521 | 1422 | asuscuGfuUfGfGf | 2050 | usUfsuacAfaGfAfucca | 8.24 | |
| | | aucuuguaaa | | AfcAfgaususu | | |
| 522 | 1423 | uscsugUfuGfGfAf | 2051 | usUfsuuaCfaAfGfaucc | 11.62 | |
| | | ucuuguaaaa | | AfaCfagasusu | | |
| 523 | 1424 | csusguUfgGfAfUf | 2052 | usGfsuuuAfcAfAfgauc | 14.71 | |
| | | cuuguaaaca | | CfaAfcagsusu | | |
| 524 | 1425 | usgsuuGfgAfUfCf | 2053 | usUfsguuUfaCfAfagau | 12.06 | |
| | | uuguaaacaa | | CfcAfacasusu | | |
| 525 | 1426 | gsusugGfaUfCfUf | 2054 | usAfsuguUfuAfCfaaga | 9.62 | |
| | | uguaaacaua | | UfcCfaacsusu | | |
| 593 | 1427 | csasacUfgUfUfGf | 2055 | usUfsgagGfaAfAfucaa | 13.10 | |
| | | auuuccucaa | | CfaGfuugsusu | | |
| 610 | 1428 | asascaUfgGfCfUf | 2056 | usAfsaauUfuGfUfgagc | 30.69 | |
| | | cacaaauuua | | CfaUfguususu | | |
| 618 | 1429 | uscsacAfaAfUfUf | 2057 | usUfsgggAfuAfGfaaau | 27.28 | |
| | | ucuaucccaa | | UfuGfugasusu | | |
| 623 | 1430 | asasuuUfcUfAfUf | 2058 | usAfsgauUfuGfGfgaua | 25.60 | |
| | | cccaaaucua | | GfaAfauususu | | |
| 624 | 1431 | asusuuCfuAfUfCf | 2059 | usAfsagaUfuUfGfggau | 24.02 | |
| | | ccaaaucuua | | AfgAfaaususu | | |
| 718 | 1432 | csusuuUfgAfGfGf | 2060 | usUfsuauAfuUfCfaccu | 20.87 | |
| | | ugaauauaaa | | CfaAfaagsusu | | |
| 776 | 1433 | ususucAfgGfUfCf | 2061 | usCfsuugGfuGfAfagac | 19.06 | |
| | | uucaccaaga | | CfuGfaaasusu | | |
| 777 | 1434 | ususcaGfgUfCfUf | 2062 | usAfscuuGfgUfGfaaga | 26.49 | |
| | | ucaccaagua | | CfcUfgaasusu | | |
| 778 | 1435 | uscsagGfuCfUfUf | 2063 | usUfsacuUfgGfUfgaag | 25.87 | |
| | | caccaaguaa | | AfcCfugasusu | | |
| 779 | 1436 | csasggUfcUfUfCf | 2064 | usAfsuacUfuGfGfugaa | 21.41 | |
| | | accaaguaua | | GfaCfcugsusu | | |
| 780 | 1437 | asgsguCfuUfCfAf | 2065 | usGfsauaCfuUfGfguga | 22.37 | |
| | | ccaaguauca | | AfgAfccususu | | |
| 813 | 1438 | asusgaAfgUfGfUf | 2066 | usUfsgaaUfaAfUfgaca | 28.69 | |
| | | cauuauucaa | | CfuUfcaususu | | |
| 839 | 1439 | csascuGfaCfUfCf | 2067 | usAfsgauGfuGfAfggag | 35.17 | |
| | | cucacaucua | | UfcAfgugsusu | | |
| 926 | 1440 | ususucUfaUfGfCf | 2068 | usGfsuuaAfuGfUfggca | 26.63 | |
| | | cacauuaaca | | UfaGfaaasusu | | |
| 49 | 1441 | gsascuUfcAfUfAf | 2069 | usAfsuugUfgUfUfguau | 6.45 | |
| | | caacacaaua | | GfaAfgucsusu | | |
| 54 | 1442 | csasuaCfaAfCfAf | 2070 | usAfsgagUfaUfUfgugu | 4.36 | |
| | | caauacucua | | UfgUfaugsusu | | |
| 55 | 1443 | asusacAfaCfAfCf | 2071 | usUfsagaGfuAfUfugug | 12.72 | |
| | | aauacucuaa | | UfuGfuaususu | | |
| 109 | 1444 | gsasagAfcAfGfUf | 2072 | usUfsaugAfgAfUfaacu | 14.05 | |
| | | uaucucauaa | | GfuCfuucsusu | | |
| 110 | 1445 | asasgaCfaGfUfUf | 2073 | usAfsuauGfaGfAfuaac | 16.93 | |
| | | aucucauaua | | UfgUfcuususu | | |
| 113 | 1446 | ascsagUfuAfUfCf | 2074 | usCfsaaaUfaUfGfagau | 30.62 | |
| | | ucauauuuga | | AfaCfugususu | | |
| 115 | 1447 | asgsuuAfuCfUfCf | 2075 | usGfsccaAfaUfAfugagA | 43.67 | |
| | | auauuuggca | | fuAfacususu | | |
| 195 | 1448 | asusggAfgAfAfAfg | 2076 | usGfsuauUfgGfAfcuuu | 20.55 | |
| | | uccaauaca | | CfuCfcaususu | | |
| 231 | 1449 | asgsaaGfaGfCfCf | 2077 | usAfsaugGfuUfGfaggc | 7.51 | |
| | | ucaaccauua | | UfcUfucususu | | |
| 232 | 1450 | gsasagAfgCfCfUf | 2078 | usCfsaauGfgUfUfgagg | 13.80 | |
| | | caaccauuga | | CfuCfuucsusu | | |
| 233 | 1451 | asasgaGfcCfUfCf | 2079 | usUfscaaUfgGfUfugag | 46.35 | |
| | | aaccauugaa | | GfcUfcuususu | | |
| 234 | 1452 | asgsagCfcUfCfAf | 2080 | usUfsucaAfuGfGfuuga | 7.26 | |
| | | accauugaaa | | GfgCfucususu | | |
| 237 | 1453 | gscscuCfaAfCfCf | 2081 | usCfsauuUfcAfAfuggu | 18.31 | |
| | | auugaaauga | | UfgAfggcsusu | | |
| 240 | 1454 | uscsaaCfcAfUfUf | 2082 | usAfsggcAfuUfUfcaau | 39.82 | |
| | | gaaaugccua | | GfgUfugasusu | | |
| 244 | 1455 | cscsauUfgAfAfAf | 2083 | usGfsuugAfgGfCfauuu | 15.39 | |
| | | ugccucaaca | | CfaAfuggsusu | | |
| 296 | 1456 | ususucUfgUfCfUf | 2084 | usAfsuuaAfgAfUfgagaC | 9.04 | |
| | | caucuuaaua | | faGfaaasusu | | |
| 304 | 1457 | uscsauCfuUfAfAf | 2085 | usAfsgagAfcAfUfauuaA | 9.97 | |
| | | uaugucucua | | fgAfugasusu | | |
| 305 | 1458 | csasucUfuAfAfUf | 2086 | usAfsagaGfaCfAfuauu | 14.37 | |
| | | augucucuua | | AfaGfaugsusu | | |
| 316 | 1459 | gsuscuCfuUfGfCf | 2087 | usUfsacaGfaUfCfagca | 5.37 | |
| | | ugaucuguaa | | AfgAfgacsusu | | |
| 317 | 1460 | uscsucUfuGfCfUf | 2088 | usAfsuacAfgAfUfcagcA | 22.39 | |
| | | gaucuguaua | | faGfagasusu | | |
| 318 | 1461 | csuscuUfgCfUfGf | 2089 | usGfsauaCfaGfAfucag | 43.38 | |
| | | aucuguauca | | CfaAfgagsusu | | |
| 319 | 1462 | uscsuuGfcUfGfAf | 2090 | usUfsgauAfcAfGfauca | 26.81 | |
| | | ucuguaucaa | | GfcAfagasusu | | |
| 320 | 1463 | csusugCfuGfAfUf | 2091 | usAfsugaUfaCfAfgaucA | 8.46 | |
| | | cuguaucaua | | fgCfaagsusu | | |
| 341 | 1464 | gsasugCfuUfCfUf | 2092 | usGfsaacUfuCfAfgaga | 6.97 | |
| | | cugaaguuca | | AfgCfaucsusu | | |
| 342 | 1465 | asusgcUfuCfUfCf | 2093 | usAfsgaaCfuUfCfagagA | 4.60 | |
| | | ugaaguucua | | faGfcaususu | | |
| 347 | 1466 | uscsucUfgAfAfGf | 2094 | usGfsuagCfaGfAfacuu | 10.37 | |
| | | uucugcuaca | | CfaGfagasusu | | |
| 352 | 1467 | gsasagUfuCfUfGf | 2095 | usAfsgguUfgUfAfgcagA | 7.63 | |
| | | cuacaaccua | | faCfuucsusu | | |
| 362 | 1468 | usascaAfcCfUfCf | 2096 | usGfscagAfuCfUfagag | 15.45 | |
| | | uagaucugca | | GfuUfguasusu | | |
| 402 | 1469 | uscsugUfcAfUfCf | 2097 | usUfscugCfaUfGfggau | 39.43 | |
| | | ccaugcagaa | | GfaCfagasusu | | |
| 446 | 1470 | csascuUfcCfUfGf | 2098 | usUfscuuCfuAfCfucag | 58.12 | |
| | | aguagaagaa | | GfaAfgugsusu | | |
| 450 | 1471 | uscscuGfaGfUfAf | 2099 | usAfsaacUfcUfUfcuac | 8.69 | |
| | | gaagaguuua | | UfcAfggasusu | | |
| 452 | 1472 | csusgaGfuAfGfAf | 2100 | usAfsgaaAfcUfCfuucuA | 8.71 | |
| | | agaguuucua | | fcUfcagsusu | | |
| 479 | 1473 | gsgsucAfaGfAfUf | 2101 | usUfsuagUfcUfUfaauc | 5.45 | |
| | | uaagacuaaa | | UfuGfaccsusu | | |
| 528 | 1474 | gsgsauCfuUfGfUf | 2102 | usUfsucaUfgUfUfuaca | 7.43 | |
| | | aaacaugaaa | | AfgAfuccsusu | | |
| 595 | 1475 | ascsugUfuGfAfUf | 2103 | usGfsuugAfgGfAfaauc | 11.93 | |
| | | uuccucaaca | | AfaCfagususu | | |
| 598 | 1476 | gsusugAfuUfUfCf | 2104 | usCfsaugUfuGfAfggaa | 17.59 | |
| | | cucaacauga | | AfuCfaacsusu | | |
| 600 | 1477 | usgsauUfuCfCfUf | 2105 | usGfsccaUfgUfUfgagg | 17.78 | |
| | | caacauggca | | AfaAfucasusu | | |
| 601 | 1478 | gsasuuUfcCfUfCf | 2106 | usAfsgccAfuGfUfugag | 17.53 | |
| | | aacauggcua | | GfaAfaucsusu | | |
| 602 | 1479 | asusuuCfcUfCfAf | 2107 | usGfsagcCfaUfGfuuga | 22.33 | |
| | | acauggcuca | | GfgAfaaususu | | |
| 604 | 1480 | ususccUfcAfAfCf | 2108 | usGfsugaGfcCfAfuguu | 30.93 | |
| | | auggcucaca | | GfaGfgaasusu | | |
| 605 | 1481 | uscscuCfaAfCfAf | 2109 | usUfsgugAfgCfCfaugu | 23.37 | |
| | | uggcucacaa | | UfgAfggasusu | | |
| 671 | 1482 | csusgcAfcUfGfCf | 2110 | usAfsacuUfgUfUfggca | 39.21 | |
| | | caacaaguua | | GfuGfcagsusu | | |
| 672 | 1483 | usgscaCfuGfCfCf | 2111 | usGfsaacUfuGfUfuggc | 15.09 | |
| | | aacaaguuca | | AfgUfgcasusu | | |
| 674 | 1484 | csascuGfcCfAfAf | 2112 | usGfsugaAfcUfUfguug | 23.73 | |
| | | caaguucaca | | GfcAfgugsusu | | |
| 675 | 1485 | ascsugCfcAfAfCf | 2113 | usAfsgugAfaCfUfuguu | 23.69 | |
| | | aaguucacua | | GfgCfagususu | | |
| 676 | 1486 | csusgcCfaAfCfAf | 2114 | usAfsaguGfaAfCfuugu | 25.06 | |
| | | aguucacuua | | UfgGfcagsusu | | |
| 679 | 1487 | cscsaaCfaAfGfUf | 2115 | usAfsugaAfgUfGfaacu | 23.71 | |
| | | ucacuucaua | | UfgUfuggsusu | | |
| 680 | 1488 | csasacAfaGfUfUf | 2116 | usUfsaugAfaGfUfgaac | 22.11 | |
| | | cacuucauaa | | UfuGfuugsusu | | |
| 681 | 1489 | asascaAfgUfUfCf | 2117 | usAfsuauGfaAfGfugaa | 39.38 | |
| | | acuucauaua | | CfuUfguususu | | |
| 682 | 1490 | ascsaaGfuUfCfAf | 2118 | usUfsauaUfgAfAfgugaA | 24.74 | |
| | | cuucauauaa | | fcUfugususu | | |
| 690 | 1491 | ascsuuCfaUfAfUf | 2119 | usAfsugcUfuUfAfuaua | 20.55 | |
| | | auaaagcaua | | UfgAfagususu | | |
| 782 | 1492 | gsuscuUfcAfCfCf | 2120 | usUfsugaUfaCfUfuggu | 20.44 | |
| | | aaguaucaaa | | GfaAfgacsusu | | |
| 783 | 1493 | uscsuuCfaCfCfAf | 2121 | usUfsuugAfuAfCfuugg | 22.64 | |
| | | aguaucaaaa | | UfgAfagasusu | | |
| 784 | 1494 | csusucAfcCfAfAf | 2122 | usCfsuuuGfaUfAfcuug | 31.18 | |
| | | guaucaaaga | | GfuGfaagsusu | | |
| 785 | 1495 | ususcaCfcAfAfGf | 2123 | usAfscuuUfgAfUfacuu | 29.83 | |
| | | uaucaaagua | | GfgUfgaasusu | | |
| 787 | 1496 | csasccAfaGfUfAf | 2124 | usUfsuacUfuUfGfauac | 24.33 | |
| | | ucaaaguaaa | | UfuGfgugsusu | | |
| 790 | 1497 | csasagUfaUfCfAf | 2125 | usUfsuauUfaCfUfuuga | 23.38 | |
| | | aaguaauaaa | | UfaCfuugsusu | | |
| 791 | 1498 | asasguAfuCfAfAf | 2126 | usGfsuuaUfuAfCfuuug | 25.42 | |
| | | aguaauaaca | | AfuAfcuususu | | |
| 792 | 1499 | asgsuaUfcAfAfAfg | 2127 | usUfsguuAfuUfAfcuuu | 27.13 | |
| | | uaauaacaa | | GfaUfacususu | | |
| 803 | 1500 | asasuaAfcAfCfAf | 2128 | usCfsacuUfcAfUfuugu | 35.55 | |
| | | aaugaaguga | | GfuUfauususu | | |
| 838 | 1501 | cscsacUfgAfCfUf | 2129 | usGfsaugUfgAfGfgagu | 33.03 | |
| | | ccucacauca | | CfaGfuggsusu | | |
| 848 | 1502 | csuscaCfaUfCfUf | 2130 | usUfsaagAfuAfAfcagaU | 33.27 | |
| | | guuaucuuaa | | fgUfgagsusu | | |
| 849 | 1503 | uscsacAfuCfUfGf | 2131 | usAfsuaaGfaUfAfacagA | 33.76 | |
| | | uuaucuuaua | | fuGfugasusu | | |
| 850 | 1504 | csascaUfcUfGfUf | 2132 | usAfsauaAfgAfUfaacaG | 38.28 | |
| | | uaucuuauua | | faUfgugsusu | | |
| 872 | 1505 | asgsaaCfuAfUfUf | 2133 | usGfsuuaCfuAfCfaaau | 29.51 | |
| | | uguaguaaca | | AfgUfucususu | | |
| 873 | 1506 | gsasacUfaUfUfUf | 2134 | usAfsguuAfcUfAfcaaaU | 24.49 | |
| | | guaguaacua | | faGfuucsusu | | |
| 876 | 1507 | csusauUfuGfUfAf | 2135 | usGfsauaGfuUfAfcuac | 23.75 | |
| | | guaacuauca | | AfaAfuagsusu | | |
| 877 | 1508 | usasuuUfgUfAfGf | 2136 | usUfsgauAfgUfUfacua | 34.23 | |
| | | uaacuaucaa | | CfaAfauasusu | | |
| 878 | 1509 | asusuuGfuAfGfUf | 2137 | usCfsugaUfaGfUfuacu | 33.05 | |
| | | aacuaucaga | | AfcAfaaususu | | |
| 882 | 1510 | gsusagUfaAfCfUf | 2138 | usGfsauuCfuGfAfuagu | 24.64 | |
| | | aucagaauca | | UfaCfuacsusu | | |
| 883 | 1511 | usasguAfaCfUfAf | 2139 | usAfsgauUfcUfGfauag | 26.59 | |
| | | ucagaaucua | | UfuAfcuasusu | | |
| 886 | 1512 | usasacUfaUfCfAf | 2140 | usUfsguaGfaUfUfcuga | 34.51 | |
| | | gaaucuacaa | | UfaGfuuasusu | | |
| 889 | 1513 | csusauCfaGfAfAf | 2141 | usGfsaauGfuAfGfauuc | 36.36 | |
| | | ucuacauuca | | UfgAfuagsusu | | |
| 950 | 1514 | usasaaGfuUfGfAf | 2142 | usUfsgauUfcUfCfauca | 31.38 | |
| | | ugagaaucaa | | AfcUfuuasusu | | |
| 951 | 1515 | asasagUfuGfAfUf | 2143 | usUfsugaUfuCfUfcauc | 23.33 | |
| | | gagaaucaaa | | AfaCfuuususu | | |
| 952 | 1516 | asasguUfgAfUfGf | 2144 | usCfsuugAfuUfCfucau | 41.41 | |
| | | agaaucaaga | | CfaAfcuususu | | |
| 953 | 1517 | asgsuuGfaUfGfAf | 2145 | usAfscuuGfaUfUfcuca | 45.77 | |
| | | gaaucaagua | | UfcAfacususu | | |
| 978 | 1518 | asgsuaAfgGfCfCf | 2146 | usUfsaagAfgUfAfuggcC | 32.91 | |
| | | auacucuuaa | | fuUfacususu | | |
| 979 | 1519 | gsusaaGfgCfCfAf | 2147 | usGfsuaaGfaGfUfaugg | 33.92 | |
| | | uacucuuaca | | CfcUfuacsusu | | |
| 980 | 1520 | usasagGfcCfAfUf | 2148 | usUfsguaAfgAfGfuaug | 29.92 | |
| | | acucuuacaa | | GfcCfuuasusu | | |
| 983 | 1521 | gsgsccAfuAfCfUf | 2149 | usUfsuauGfuAfAfgagu | 35.66 | |
| | | cuuacauaaa | | AfuGfgccsusu | | |
| 984 | 1522 | gscscaUfaCfUfCf | 2150 | usAfsuuaUfgUfAfagagU | 32.52 | |
| | | uuacauaaua | | faUfggcsusu | | |
| 1066 | 1523 | asasucUfgUfUfCf | 2151 | usUfsaugUfcUfUfagaa | 22.71 | |
| | | uaagacauaa | | CfaGfauususu | | |
| 1068 | 1524 | uscsugUfuCfUfAf | 2152 | usCfsauaUfgUfCfuuag | 29.19 | |
| | | agacauauga | | AfaCfagasusu | | |
| 1071 | 1525 | gsusucUfaAfGfAf | 2153 | usGfsaucAfuAfUfgucu | 26.90 | |
| | | cauaugauca | | UfaGfaacsusu | | |
| 1072 | 1526 | ususcuAfaGfAfCf | 2154 | usUfsgauCfaUfAfuguc | 30.92 | |
| | | auaugaucaa | | UfuAfgaasusu | | |
| 1073 | 1527 | uscsuaAfgAfCfAf | 2155 | usUfsugaUfcAfUfaugu | 31.98 | |
| | | uaugaucaaa | | CfuUfagasusu | | |
| 1077 | 1528 | asgsacAfuAfUfGf | 2156 | usUfscugUfuGfAfucau | 39.81 | |
| | | aucaacagaa | | AfuGfucususu | | |
| 1078 | 1529 | gsascaUfaUfGfAf | 2157 | usAfsucuGfuUfGfauca | 41.36 | |
| | | ucaacagaua | | UfaUfgucsusu | | |
| 1079 | 1530 | ascsauAfuGfAfUf | 2158 | usCfsaucUfgUfUfgauc | 94.78 | |
| | | caacagauga | | AfuAfugususu | | |
| 1082 | 1531 | usasugAfuCfAfAf | 2159 | usUfscucAfuCfUfguug | 24.50 | |
| | | cagaugagaa | | AfuCfauasusu | | |
| 1083 | 1532 | asusgaUfcAfAfCf | 2160 | usUfsucuCfaUfCfuguu | 34.08 | |
| | | agaugagaaa | | GfaUfcaususu | | |
| 1118 | 1533 | ascsagUfgAfGfAf | 2161 | usUfsaugAfcUfAfaucu | 30.60 | |
| | | uuagucauaa | | CfaCfugususu | | |
| 1119 | 1534 | csasguGfaGfAfUf | 2162 | usAfsuauGfaCfUfaauc | 37.29 | |
| | | uagucauaua | | UfcAfcugsusu | | |
| 1121 | 1535 | gsusgaGfaUfUfAf | 2163 | usUfsgauAfuGfAfcuaa | 51.77 | |
| | | gucauaucaa | | UfcUfcacsusu | | |
| 1205 | 1536 | usasccUfaGfCfUf | 2164 | usAfsguaUfgGfUfaagc | 28.15 | |
| | | uaccauacua | | UfaGfguasusu | | |
| 1206 | 1537 | ascscuAfgCfUfUf | 2165 | usUfsaguAfuGfGfuaag | 35.04 | |
| | | accauacuaa | | CfuAfggususu | | |
| 1207 | 1538 | cscsuaGfcUfUfAf | 2166 | usAfsuagUfaUfGfguaa | 48.17 | |
| | | ccauacuaua | | GfcUfaggsusu | | |
| 1208 | 1539 | csusagCfuUfAfCf | 2167 | usUfsauaGfuAfUfggua | 40.91 | |
| | | cauacuauaa | | AfgCfuagsusu | | |
| 1210 | 1540 | asgscuUfaCfCfAf | 2168 | usGfsauaUfaGfUfaugg | 27.54 | |
| | | uacuauauca | | UfaAfgcususu | | |
| 1375 | 1541 | uscsucUfcUfCfCf | 2169 | usUfsuaaUfaUfUfugga | 32.25 | |
| | | aaauauuaaa | | GfaGfagasusu | | |
| 1417 | 1542 | asusgaAfcUfUfGf | 2170 | usAfsuggGfcCfAfacaa | 40.22 | |
| | | uuggcccaua | | GfuUfcaususu | | |
| 1418 | 1543 | usgsaaCfuUfGfUf | 2171 | usGfsaugGfgCfCfaaca | 53.77 | |
| | | uggcccauca | | AfgUfucasusu | | |
| 1419 | 1544 | gsasacUfuGfUfUf | 2172 | usAfsgauGfgGfCfcaac | 37.67 | |
| | | ggcccaucua | | AfaGfuucsusu | | |
| 1420 | 1545 | asascuUfgUfUfGf | 2173 | usUfsagaUfgGfGfccaa | 64.61 | |
| | | gcccaucuaa | | CfaAfguususu | | |
| 1422 | 1546 | csusugUfuGfGfCf | 2174 | usAfsauaGfaUfGfggcc | 57.75 | |
| | | ccaucuauua | | AfaCfaagsusu | | |
| 1424 | 1547 | usgsuuGfgCfCfCf | 2175 | usGfsuaaUfaGfAfuggg | 66.15 | |
| | | aucuauuaca | | CfcAfacasusu | | |
| 1956 | 1548 | asusagAfuCfCfAf | 2176 | usUfsagcAfuAfGfcuggA | 74.96 | |
| | | gcuaugcuaa | | fuCfuaususu | | |
| 1957 | 1549 | usasgaUfcCfAfGf | 2177 | usAfsuagCfaUfAfgcug | 57.39 | |
| | | cuaugcuaua | | GfaUfcuasusu | | |
| 1958 | 1550 | asgsauCfcAfGfCf | 2178 | usAfsauaGfcAfUfagcu | 65.32 | |
| | | uaugcuauua | | GfgAfucususu | | |
| 2025 | 1551 | uscsagAfaCfAfUf | 2179 | usUfsauuGfgAfAfgaug | 73.83 | |
| | | cuuccaauaa | | UfuCfugasusu | | |
| 2030 | 1552 | ascsauCfuUfCfCf | 2180 | usUfsgagUfuAfUfuggaA | 67.72 | |
| | | aauaacucaa | | fgAfugususu | | |
| 2087 | 1553 | uscsacCfaAfAfCf | 2181 | usAfsuuaCfcAfAfaguu | 82.44 | |
| | | uuugguaaua | | UfgGfugasusu | | |
| 2088 | 1554 | csasccAfaAfCfUf | 2182 | usAfsauuAfcCfAfaagu | 78.70 | |
| | | uugguaauua | | UfuGfgugsusu | | |
| 2094 | 1555 | ascsuuUfgGfUfAf | 2183 | usAfsacuUfaAfAfuuac | 103.75 | |
| | | auuuaaguua | | CfaAfagususu | | |
| 2099 | 1556 | gsgsuaAfuUfUfAf | 2184 | usUfsaguCfaAfCfuuaa | 66.60 | |
| | | aguugacuaa | | AfuUfaccsusu | | |
| 2145 | 1557 | ascsacCfuAfUfAf | 2185 | usAfsuuaUfgCfAfguauA | 76.44 | |
| | | cugcauaaua | | fgGfugususu | | |
| 2146 | 1558 | csasccUfaUfAfCf | 2186 | usGfsauuAfuGfCfagua | 80.08 | |
| | | ugcauaauca | | UfaGfgugsusu | | |
| 2147 | 1559 | ascscuAfuAfCfUf | 2187 | usGfsgauUfaUfGfcagu | 87.40 | |
| | | gcauaaucca | | AfuAfggususu | | |
| 2148 | 1560 | cscsuaUfaCfUfGf | 2188 | usUfsggaUfuAfUfgcag | 89.46 | |
| | | cauaauccaa | | UfaUfaggsusu | | |
| 2150 | 1561 | usasuaCfuGfCfAf | 2189 | usGfsuugGfaUfUfaugc | 51.64 | |
| | | uaauccaaca | | AfgUfauasusu | | |
| 2151 | 1562 | asusacUfgCfAfUf | 2190 | usUfsguuGfgAfUfuaug | 51.05 | |
| | | aauccaacaa | | CfaGfuaususu | | |
| 2152 | 1563 | usascuGfcAfUfAf | 2191 | usUfsuguUfgGfAfuuau | 70.35 | |
| | | auccaacaaa | | GfcAfguasusu | | |
| 2153 | 1564 | ascsugCfaUfAfAf | 2192 | usAfsuugUfuGfGfauua | 48.18 | |
| | | uccaacaaua | | UfgCfagususu | | |
| 2182 | 1565 | ususgaAfgAfCfAf | 2193 | usUfsuagUfaAfCfaugu | 64.02 | |
| | | uguuacuaaa | | CfuUfcaasusu | | |
| 2183 | 1566 | usgsaaGfaCfAfUf | 2194 | usAfsuuaGfuAfAfcaug | 58.98 | |
| | | guuacuaaua | | UfcUfucasusu | | |
| 2188 | 1567 | ascsauGfuUfAfCf | 2195 | usGfsuuaUfaUfUfagua | 66.46 | |
| | | uaauauaaca | | AfcAfugususu | | |
| 2216 | 1568 | asgsagUfaGfAfGf | 2196 | usUfsuacAfcAfUfccuc | 78.32 | |
| | | gauguguaaa | | UfaCfucususu | | |
| 2228 | 1569 | gsusguAfaUfUfAf | 2197 | usAfsgauAfuGfGfuuaa | 76.05 | |
| | | accauaucua | | UfuAfcacsusu | | |
| 2281 | 1570 | asasuaUfuGfAfCf | 2198 | usGfsaaaCfcAfAfggucA | 58.26 | |
| | | cuugguuuca | | faUfauususu | | |
| 2282 | 1571 | asusauUfgAfCfCf | 2199 | usAfsgaaAfcCfAfagguC | 55.68 | |
| | | uugguuucua | | faAfuaususu | | |
| 2284 | 1572 | asusugAfcCfUfUf | 2200 | usUfsaagAfaAfCfcaag | 66.52 | |
| | | gguuucuuaa | | GfuCfaaususu | | |
| 2288 | 1573 | ascscuUfgGfUfUf | 2201 | usUfsgugUfaAfGfaaac | 59.09 | |
| | | ucuuacacaa | | CfaAfggususu | | |
| 2293 | 1574 | gsgsuuUfcUfUfAf | 2202 | usAfscacUfuGfUfguaa | 48.08 | |
| | | cacaagugua | | GfaAfaccsusu | | |
| 2295 | 1575 | ususucUfuAfCfAf | 2203 | usCfsaacAfcUfUfgugu | 57.57 | |
| | | caaguguuga | | AfaGfaaasusu | | |
| 2297 | 1576 | uscsuuAfcAfCfAf | 2204 | usAfsgcaAfcAfCfuuguG | 62.30 | |
| | | aguguugcua | | fuAfagasusu | | |
| 2303 | 1577 | ascsaaGfuGfUfUf | 2205 | usUfsgagUfuAfGfcaac | 77.19 | |
| | | gcuaacucaa | | AfcUfugususu | | |
| 2306 | 1578 | asgsugUfuGfCfUf | 2206 | usUfsauuGfaGfUfuagc | 49.68 | |
| | | aacucaauaa | | AfaCfacususu | | |
| 2307 | 1579 | gsusguUfgCfUfAf | 2207 | usCfsuauUfgAfGfuuag | 53.61 | |
| | | acucaauaga | | CfaAfcacsusu | | |
| 2308 | 1580 | usgsuuGfcUfAfAf | 2208 | usAfscuaUfuGfAfguua | 61.78 | |
| | | cucaauagua | | GfcAfacasusu | | |
| 2310 | 1581 | ususgcUfaAfCfUf | 2209 | usUfscacUfaUfUfgagu | 61.07 | |
| | | caauagugaa | | UfaGfcaasusu | | |
| 2311 | 1582 | usgscuAfaCfUfCf | 2210 | usUfsucaCfuAfUfugag | 63.20 | |
| | | aauagugaaa | | UfuAfgcasusu | | |
| 2315 | 1583 | asascuCfaAfUfAf | 2211 | usCfsuccUfuCfAfcuau | 61.31 | |
| | | gugaaggaga | | UfgAfguususu | | |
| 2317 | 1584 | csuscaAfuAfGfUf | 2212 | usGfsucuCfcUfUfcacu | 77.80 | |
| | | gaaggagaca | | AfuUfgagsusu | | |
| 2380 | 1585 | usgsgaAfaGfUfGf | 2213 | usUfsgaaCfcAfAfacac | 86.81 | |
| | | uuugguucaa | | UfuUfccasusu | | |
| 2389 | 1586 | ususugGfuUfCfAf | 2214 | usAfsgauAfuCfCfcugaA | 67.12 | |
| | | gggauaucua | | fcCfaaasusu | | |
| 2390 | 1587 | ususggUfuCfAfGf | 2215 | usCfsagaUfaUfCfccug | 70.65 | |
| | | ggauaucuga | | AfaCfcaasusu | | |
| 2420 | 1588 | gscsagAfgAfUfUf | 2216 | usCfsacuUfaAfGfaaau | 66.05 | |
| | | ucuuaaguga | | CfuCfugcsusu | | |
| 2432 | 1589 | usasagUfgAfCfGf | 2217 | usUfsagaUfgAfGfgcgu | 58.20 | |
| | | ccucaucuaa | | CfaCfuuasusu | | |
| 2434 | 1590 | asgsugAfcGfCfCf | 2218 | usUfsguaGfaUfGfaggc | 53.76 | |
| | | ucaucuacaa | | GfuCfacususu | | |
| 2437 | 1591 | gsascgCfcUfCfAf | 2219 | usGfscuuGfuAfGfauga | 62.67 | |
| | | ucuacaagca | | GfgCfgucsusu | | |
| 2443 | 1592 | uscsauCfuAfCfAf | 2220 | usUfsuucCfaGfCfuugu | 66.34 | |
| | | agcuggaaaa | | AfgAfugasusu | | |
| 2601 | 1593 | usascaCfuGfUfUf | 2221 | usAfsuugUfaAfCfaaacA | 70.82 | |
| | | uguuacaaua | | fgUfguasusu | | |
| 2681 | 1594 | asuscuUfaUfUfCf | 2222 | usAfsuccUfcAfCfagaa | 68.99 | |
| | | ugugaggaua | | UfaAfgaususu | | |
| 2697 | 1595 | asusuaCfaGfAfAf | 2223 | usGfsuuaUfaGfUfauuc | 67.69 | |
| | | uacuauaaca | | UfgUfaaususu | | |
| 2700 | 1596 | ascsagAfaUfAfCf | 2224 | usUfsgagUfuAfUfagua | 61.44 | |
| | | uauaacucaa | | UfuCfugususu | | |
| 2947 | 1597 | asasauCfaGfAfAf | 2225 | usAfsuauAfgUfGfauuc | 46.88 | |
| | | ucacuauaua | | UfgAfuuususu | | |
| 17 | 1598 | asgsucAfgAfAfAfa | 2226 | usCfsuggGfgAfGfuuuu | 42.21 | |
| | | cuccccaga | | CfuGfacususu | | |
| 18 | 1599 | gsuscaGfaAfAfAf | 2227 | usGfscugGfgGfAfguuu | 48.17 | |
| | | cuccccagca | | UfcUfgacsusu | | |
| 19 | 1600 | uscsagAfaAfAfCf | 2228 | usAfsgcuGfgGfGfaguu | 56.58 | |
| | | uccccagcua | | UfuCfugasusu | | |
| 20 | 1601 | csasgaAfaAfCfUf | 2229 | usUfsagcUfgGfGfgagu | 58.57 | |
| | | ccccagcuaa | | UfuUfcugsusu | | |
| 21 | 1602 | asgsaaAfaCfUfCf | 2230 | usUfsuagCfuGfGfggag | 42.63 | |
| | | cccagcuaaa | | UfuUfucususu | | |
| 45 | 1603 | gsusaaGfaCfUfUf | 2231 | usUfsguuGfuAfUfgaag | 15.40 | |
| | | cauacaacaa | | UfcUfuacsusu | | |
| 47 | 1604 | asasgaCfuUfCfAf | 2232 | usUfsgugUfuGfUfauga | 10.28 | |
| | | uacaacacaa | | AfgUfcuususu | | |
| 48 | 1605 | asgsacUfuCfAfUf | 2233 | usUfsuguGfuUfGfuaug | 12.31 | |
| | | acaacacaaa | | AfaGfucususu | | |
| 91 | 1606 | usgsccAfaGfGfCf | 2234 | usUfsuuuAfgGfUfagcc | 21.14 | |
| | | uaccuaaaaa | | UfuGfgcasusu | | |
| 94 | 1607 | csasagGfcUfAfCf | 2235 | usUfsucuUfuUfAfggua | 29.38 | |
| | | cuaaaagaaa | | GfcCfuugsusu | | |
| 95 | 1608 | asasggCfuAfCfCf | 2236 | usCfsuucUfuUfUfaggu | 27.61 | |
| | | uaaaagaaga | | AfgCfcuususu | | |
| 96 | 1609 | asgsgcUfaCfCfUf | 2237 | usUfscuuCfuUfUfuagg | 40.43 | |
| | | aaaagaagaa | | UfaGfccususu | | |
| 97 | 1610 | gsgscuAfcCfUfAf | 2238 | usGfsucuUfcUfUfuuag | 58.44 | |
| | | aaagaagaca | | GfuAfgccsusu | | |
| 98 | 1611 | gscsuaCfcUfAfAf | 2239 | usUfsgucUfuCfUfuuua | 33.27 | |
| | | aagaagacaa | | GfgUfagcsusu | | |
| 99 | 1612 | csusacCfuAfAfAf | 2240 | usCfsuguCfuUfCfuuuu | 27.04 | |
| | | agaagacaga | | AfgGfuagsusu | | |
| 100 | 1613 | usasccUfaAfAfAf | 2241 | usAfscugUfcUfUfcuuu | 47.89 | |
| | | gaagacagua | | UfaGfguasusu | | |
| 101 | 1614 | ascscuAfaAfAfGf | 2242 | usAfsacuGfuCfUfucuu | 60.92 | |
| | | aagacaguua | | UfuAfggususu | | |
| 102 | 1615 | cscsuaAfaAfGfAf | 2243 | usUfsaacUfgUfCfuucu | 31.31 | |
| | | agacaguuaa | | UfuUfaggsusu | | |
| 103 | 1616 | csusaaAfaGfAfAf | 2244 | usAfsuaaCfuGfUfcuuc | 29.35 | |
| | | gacaguuaua | | UfuUfuagsusu | | |
| 104 | 1617 | usasaaAfgAfAfGf | 2245 | usGfsauaAfcUfGfucuu | 25.09 | |
| | | acaguuauca | | CfuUfuuasusu | | |
| 105 | 1618 | asasaaGfaAfGfAf | 2246 | usAfsgauAfaCfUfgucu | 7.28 | |
| | | caguuaucua | | UfcUfuuususu | | |
| 106 | 1619 | asasagAfaGfAfCf | 2247 | usGfsagaUfaAfCfuguc | 7.51 | |
| | | aguuaucuca | | UfuCfuuususu | | |
| 107 | 1620 | asasgaAfgAfCfAfg | 2248 | usUfsgagAfuAfAfcuguC | 17.79 | |
| | | uuaucucaa | | fuUfcuususu | | |
| 108 | 1621 | asgsaaGfaCfAfGf | 2249 | usAfsugaGfaUfAfacug | 8.17 | |
| | | uuaucucaua | | UfcUfucususu | | |
| 111 | 1622 | asgsacAfgUfUfAf | 2250 | usAfsauaUfgAfGfauaa | 12.33 | |
| | | ucucauauua | | CfuGfucususu | | |
| 112 | 1623 | gsascaGfuUfAfUf | 2251 | usAfsaauAfuGfAfgauaA | 14.76 | |
| | | cucauauuua | | fcUfgucsusu | | |
| 114 | 1624 | csasguUfaUfCfUf | 2252 | usCfscaaAfuAfUfgaga | 18.68 | |
| | | cauauuugga | | UfaAfcugsusu | | |
| 161 | 1625 | csusuaAfaAfCfUf | 2253 | usGfsaagUfcUfGfaagu | 10.58 | |
| | | ucagacuuca | | UfuUfaagsusu | | |
| 163 | 1626 | usasaaAfcUfUfCf | 2254 | usAfsggaAfgUfCfugaaG | 30.49 | |
| | | agacuuccua | | fuUfuuasusu | | |
| 181 | 1627 | gsusccUfgCfUfGf | 2255 | usCfscauGfaUfAfccag | 48.12 | |
| | | guaucaugga | | CfaGfgacsusu | | |
| 182 | 1628 | uscscuGfcUfGfGf | 2256 | usUfsccaUfgAfUfacca | 41.16 | |
| | | uaucauggaa | | GfcAfggasusu | | |
| 183 | 1629 | cscsugCfuGfGfUf | 2257 | usCfsuccAfuGfAfuacc | 14.47 | |
| | | aucauggaga | | AfgCfaggsusu | | |
| 184 | 1630 | csusgcUfgGfUfAf | 2258 | usUfscucCfaUfGfauac | 37.87 | |
| | | ucauggagaa | | CfaGfcagsusu | | |
| 185 | 1631 | usgscuGfgUfAfUf | 2259 | usUfsucuCfcAfUfgaua | 19.30 | |
| | | cauggagaaa | | CfcAfgcasusu | | |
| 186 | 1632 | gscsugGfuAfUfCf | 2260 | usUfsuucUfcCfAfugau | 15.06 | |
| | | auggagaaaa | | AfcCfagcsusu | | |
| 187 | 1633 | csusggUfaUfCfAf | 2261 | usCfsuuuCfuCfCfauga | 14.24 | |
| | | uggagaaaga | | UfaCfcagsusu | | |
| 188 | 1634 | usgsguAfuCfAfUf | 2262 | usAfscuuUfcUfCfcaug | 15.76 | |
| | | ggagaaagua | | AfuAfccasusu | | |
| 189 | 1635 | gsgsuaUfcAfUfGf | 2263 | usGfsacuUfuCfUfccau | 28.42 | |
| | | gagaaaguca | | GfaUfaccsusu | | |
| 197 | 1636 | gsgsagAfaAfGfUf | 2264 | usAfsgguAfuUfGfgacu | 10.97 | |
| | | ccaauaccua | | UfuCfuccsusu | | |
| 198 | 1637 | gsasgaAfaGfUfCf | 2265 | usGfsaggUfaUfUfggac | 10.78 | |
| | | caauaccuca | | UfuUfcucsusu | | |
| 200 | 1638 | gsasaaGfuCfCfAf | 2266 | usGfsugaGfgUfAfuugg | 25.41 | |
| | | auaccucaca | | AfcUfuucsusu | | |
| 201 | 1639 | asasagUfcCfAfAf | 2267 | usAfsgugAfgGfUfauug | 32.42 | |
| | | uaccucacua | | GfaCfuuususu | | |
| 205 | 1640 | uscscaAfuAfCfCf | 2268 | usAfsgcgAfgUfGfagguA | 17.83 | |
| | | ucacucgcua | | fuUfggasusu | | |
| 212 | 1641 | cscsucAfcUfCfGf | 2269 | usAfsuagCfuGfAfgcga | 20.09 | |
| | | cucagcuaua | | GfuGfaggsusu | | |
| 213 | 1642 | csuscaCfuCfGfCf | 2270 | usUfsauaGfcUfGfagcg | 8.81 | |
| | | ucagcuauaa | | AfgUfgagsusu | | |
| 214 | 1643 | uscsacUfcGfCfUf | 2271 | usUfsuauAfgCfUfgagc | 37.53 | |
| | | cagcuauaaa | | GfaGfugasusu | | |
| 215 | 1644 | csascuCfgCfUfCf | 2272 | usCfsuuaUfaGfCfugag | 28.71 | |
| | | agcuauaaga | | CfgAfgugsusu | | |
| 217 | 1645 | csuscgCfuCfAfGf | 2273 | usUfsucuUfaUfAfgcug | 13.58 | |
| | | cuauaagaaa | | AfgCfgagsusu | | |
| 221 | 1646 | csuscaGfcUfAfUf | 2274 | usGfscucUfuCfUfuaua | 50.17 | |
| | | aagaagagca | | GfcUfgagsusu | | |
| 222 | 1647 | uscsagCfuAfUfAf | 2275 | usGfsgcuCfuUfCfuuau | 31.37 | |
| | | agaagagcca | | AfgCfugasusu | | |
| 224 | 1648 | asgscuAfuAfAfGf | 2276 | usGfsaggCfuCfUfucuu | 46.09 | |
| | | aagagccuca | | AfuAfgcususu | | |
| 229 | 1649 | usasagAfaGfAfGf | 2277 | usUfsgguUfgAfGfgcuc | 19.57 | |
| | | ccucaaccaa | | UfuCfuuasusu | | |
| 254 | 1650 | gscscuCfaAfCfAf | 2278 | usUfsgacGfuGfCfuugu | 11.02 | |
| | | agcacgucaa | | UfgAfggcsusu | | |
| 255 | 1651 | cscsucAfaCfAfAf | 2279 | usUfsugaCfgUfGfcuug | 17.96 | |
| | | gcacgucaaa | | UfuGfaggsusu | | |
| 256 | 1652 | csuscaAfcAfAfGf | 2280 | usUfsuugAfcGfUfgcuu | 65.11 | |
| | | cacgucaaaa | | GfuUfgagsusu | | |
| 257 | 1653 | uscsaaCfaAfGfCf | 2281 | usUfsuuuGfaCfGfugcu | 20.27 | |
| | | acgucaaaaa | | UfgUfugasusu | | |
| 290 | 1654 | usasucAfaUfUfUf | 2282 | usAfsugaGfaCfAfgaaa | 8.85 | |
| | | cugucucaua | | UfuGfauasusu | | |
| 291 | 1655 | asuscaAfuUfUfCf | 2283 | usGfsaugAfgAfCfagaaA | 9.15 | |
| | | ugucucauca | | fuUfgaususu | | |
| 292 | 1656 | uscsaaUfuUfCfUf | 2284 | usAfsgauGfaGfAfcagaA | 14.18 | |
| | | gucucaucua | | faUfugasusu | | |
| 293 | 1657 | csasauUfuCfUfGf | 2285 | usAfsagaUfgAfGfacagA | 5.39 | |
| | | ucucaucuua | | faAfuugsusu | | |
| 297 | 1658 | ususcuGfuCfUfCf | 2286 | usUfsauuAfaGfAfugagA | 9.52 | |
| | | aucuuaauaa | | fcAfgaasusu | | |
| 298 | 1659 | uscsugUfcUfCfAf | 2287 | usAfsuauUfaAfGfauga | 7.54 | |
| | | ucuuaauaua | | GfaCfagasusu | | |
| 299 | 1660 | csusguCfuCfAfUf | 2288 | usCfsauaUfuAfAfgaugA | 7.55 | |
| | | cuuaauauga | | fgAfcagsusu | | |
| 313 | 1661 | usasugUfcUfCfUf | 2289 | usAfsgauCfaGfCfaaga | 6.78 | |
| | | ugcugaucua | | GfaCfauasusu | | |
| 346 | 1662 | ususcuCfuGfAfAf | 2290 | usUfsagcAfgAfAfcuucA | 27.15 | |
| | | guucugcuaa | | fgAfgaasusu | | |
| 348 | 1663 | csuscuGfaAfGfUf | 2291 | usUfsguaGfcAfGfaacu | 28.69 | |
| | | ucugcuacaa | | UfcAfgagsusu | | |
| 353 | 1664 | asasguUfcUfGfCf | 2292 | usGfsaggUfuGfUfagca | 6.45 | |
| | | uacaaccuca | | GfaAfcuususu | | |
| 354 | 1665 | asgsuuCfuGfCfUf | 2293 | usAfsgagGfuUfGfuagc | 7.03 | |
| | | acaaccucua | | AfgAfacususu | | |
| 355 | 1666 | gsusucUfgCfUfAf | 2294 | usUfsagaGfgUfUfguag | 13.17 | |
| | | caaccucuaa | | CfaGfaacsusu | | |
| 357 | 1667 | uscsugCfuAfCfAf | 2295 | usUfscuaGfaGfGfuugu | 22.60 | |
| | | accucuagaa | | AfgCfagasusu | | |
| 361 | 1668 | csusacAfaCfCfUf | 2296 | usCfsagaUfcUfAfgaggU | 7.39 | |
| | | cuagaucuga | | fuGfuagsusu | | |
| 363 | 1669 | ascsaaCfcUfCfUf | 2297 | usUfsgcaGfaUfCfuaga | 12.75 | |
| | | agaucugcaa | | GfgUfugususu | | |
| 381 | 1670 | gscsuuGfcCfAfCf | 2298 | usUfsaagCfuGfAfugug | 4.78 | |
| | | aucagcuuaa | | GfcAfagcsusu | | |
| 382 | 1671 | csusugCfcAfCfAf | 2299 | usUfsuaaGfcUfGfaugu | 4.86 | |
| | | ucagcuuaaa | | GfgCfaagsusu | | |
| 383 | 1672 | ususgcCfaCfAfUf | 2300 | usUfsuuaAfgCfUfgaug | 5.63 | |
| | | cagcuuaaaa | | UfgGfcaasusu | | |
| 387 | 1673 | csascaUfcAfGfCf | 2301 | usAfsgauUfuUfAfagcu | 6.15 | |
| | | uuaaaaucua | | GfaUfgugsusu | | |
| 388 | 1674 | ascsauCfaGfCfUf | 2302 | usCfsagaUfuUfUfaagc | 5.44 | |
| | | uaaaaucuga | | UfgAfugususu | | |
| 389 | 1675 | csasucAfgCfUfUf | 2303 | usAfscagAfuUfUfuaag | 8.02 | |
| | | aaaaucugua | | CfuGfaugsusu | | |
| 390 | 1676 | asuscaGfcUfUfAf | 2304 | usGfsacaGfaUfUfuuaa | 28.60 | |
| | | aaaucuguca | | GfcUfgaususu | | |
| 391 | 1677 | uscsagCfuUfAfAf | 2305 | usUfsgacAfgAfUfuuuaA | 6.69 | |
| | | aaucugucaa | | fgCfugasusu | | |
| 392 | 1678 | csasgcUfuAfAfAf | 2306 | usAfsugaCfaGfAfuuuu | 5.88 | |
| | | aucugucaua | | AfaGfcugsusu | | |
| 393 | 1679 | asgscuUfaAfAfAf | 2307 | usGfsaugAfcAfGfauuu | 12.00 | |
| | | ucugucauca | | UfaAfgcususu | | |
| 394 | 1680 | gscsuuAfaAfAfUf | 2308 | usGfsgauGfaCfAfgauu | 10.23 | |
| | | cugucaucca | | UfuAfagcsusu | | |
| 438 | 1681 | usasacAfgAfCfCf | 2309 | usUfscagGfaAfGfuggu | 15.16 | |
| | | acuuccugaa | | CfuGfuuasusu | | |
| 440 | 1682 | ascsagAfcCfAfCf | 2310 | usAfscucAfgGfAfagugG | 13.77 | |
| | | uuccugagua | | fuCfugususu | | |
| 441 | 1683 | csasgaCfcAfCfUf | 2311 | usUfsacuCfaGfGfaagu | 15.01 | |
| | | uccugaguaa | | GfgUfcugsusu | | |
| 442 | 1684 | asgsacCfaCfUfUf | 2312 | usCfsuacUfcAfGfgaag | 13.69 | |
| | | ccugaguaga | | UfgGfucususu | | |
| 443 | 1685 | gsasccAfcUfUfCf | 2313 | usUfscuaCfuCfAfggaa | 14.56 | |
| | | cugaguagaa | | GfuGfgucsusu | | |
| 449 | 1686 | ususccUfgAfGfUf | 2314 | usAfsacuCfuUfCfuacu | 10.17 | |
| | | agaagaguua | | CfaGfgaasusu | | |
| 469 | 1687 | ususugUfgAfAfAf | 2315 | usUfscuuGfaCfCfuuuu | 10.08 | |
| | | aggucaagaa | | CfaCfaaasusu | | |
| 472 | 1688 | gsusgaAfaAfGfGf | 2316 | usUfsaauCfuUfGfaccu | 5.65 | |
| | | ucaagauuaa | | UfuUfcacsusu | | |
| 473 | 1689 | usgsaaAfaGfGfUf | 2317 | usUfsuaaUfcUfUfgacc | 6.20 | |
| | | caagauuaaa | | UfuUfucasusu | | |
| 474 | 1690 | gsasaaAfgGfUfCf | 2318 | usCfsuuaAfuCfUfugac | 12.45 | |
| | | aagauuaaga | | CfuUfuucsusu | | |
| 526 | 1691 | ususggAfuCfUfUf | 2319 | usCfsaugUfuUfAfcaag | 9.46 | |
| | | guaaacauga | | AfuCfcaasusu | | |
| 527 | 1692 | usgsgaUfcUfUfGf | 2320 | usUfscauGfuUfUfacaa | 11.04 | |
| | | uaaacaugaa | | GfaUfccasusu | | |
| 531 | 1693 | uscsuuGfuAfAfAf | 2321 | usCfsuuuUfcAfUfguuu | 16.13 | |
| | | caugaaaaga | | AfcAfagasusu | | |
| 532 | 1694 | csusugUfaAfAfCf | 2322 | usCfscuuUfuCfAfuguu | 12.04 | |
| | | augaaaagga | | UfaCfaagsusu | | |
| 533 | 1695 | ususguAfaAfCfAf | 2323 | usCfsccuUfuUfCfaugu | 12.99 | |
| | | ugaaaaggga | | UfuAfcaasusu | | |
| 537 | 1696 | asasacAfuGfAfAf | 2324 | usAfsaagCfcCfUfuuuc | 9.15 | |
| | | aagggcuuua | | AfuGfuuususu | | |
| 538 | 1697 | asascaUfgAfAfAfa | 2325 | usUfsaaaGfcCfCfuuuu | 11.42 | |
| | | gggcuuuaa | | CfaUfguususu | | |
| 628 | 1698 | csusauCfcCfAfAf | 2326 | usAfsgaaAfaGfAfuuug | 16.43 | |
| | | aucuuuucua | | GfgAfuagsusu | | |
| 630 | 1699 | asusccCfaAfAfUf | 2327 | usUfscagAfaAfAfgauuU | 21.96 | |
| | | cuuuucugaa | | fgGfgaususu | | |
| 631 | 1700 | uscsccAfaAfUfCf | 2328 | usUfsucaGfaAfAfagau | 32.77 | |
| | | uuuucugaaa | | UfuGfggasusu | | |
| 639 | 1701 | csusuuUfcUfGfAf | 2329 | usUfscuuCfaUfCfuuca | 23.42 | |
| | | agaugaagaa | | GfaAfaagsusu | | |
| 640 | 1702 | ususuuCfuGfAfAf | 2330 | usCfsucuUfcAfUfcuuc | 16.65 | |
| | | gaugaagaga | | AfgAfaaasusu | | |
| 641 | 1703 | ususucUfgAfAfGf | 2331 | usAfscucUfuCfAfucuu | 16.55 | |
| | | augaagagua | | CfaGfaaasusu | | |
| 642 | 1704 | ususcuGfaAfGfAf | 2332 | usAfsacuCfuUfCfaucu | 18.04 | |
| | | ugaagaguua | | UfcAfgaasusu | | |
| 643 | 1705 | uscsugAfaGfAfUf | 2333 | usAfsaacUfcUfUfcauc | 17.05 | |
| | | gaagaguuua | | UfuCfagasusu | | |
| 644 | 1706 | csusgaAfgAfUfGf | 2334 | usUfsaaaCfuCfUfucau | 21.95 | |
| | | aagaguuuaa | | CfuUfcagsusu | | |
| 645 | 1707 | usgsaaGfaUfGfAf | 2335 | usCfsuaaAfcUfCfuuca | 22.83 | |
| | | agaguuuaga | | UfcUfucasusu | | |
| 646 | 1708 | gsasagAfuGfAfAfg | 2336 | usAfscuaAfaCfUfcuuc | 26.39 | |
| | | aguuuagua | | AfuCfuucsusu | | |
| 670 | 1709 | ascsugCfaCfUfGf | 2337 | usAfscuuGfuUfGfgcag | 23.93 | |
| | | ccaacaagua | | UfgCfagususu | | |
| 673 | 1710 | gscsacUfgCfCfAf | 2338 | usUfsgaaCfuUfGfuugg | 23.52 | |
| | | acaaguucaa | | CfaGfugcsusu | | |
| 677 | 1711 | usgsccAfaCfAfAfg | 2339 | usGfsaagUfgAfAfcuug | 19.93 | |
| | | uucacuuca | | UfuGfgcasusu | | |
| 687 | 1712 | ususcaCfuUfCfAf | 2340 | usCfsuuuAfuAfUfauga | 26.21 | |
| | | uauauaaaga | | AfgUfgaasusu | | |
| 688 | 1713 | uscsacUfuCfAfUf | 2341 | usGfscuuUfaUfAfuaug | 24.69 | |
| | | auauaaagca | | AfaGfugasusu | | |
| 689 | 1714 | csascuUfcAfUfAf | 2342 | usUfsgcuUfuAfUfauau | 30.20 | |
| | | uauaaagcaa | | GfaAfgugsusu | | |
| 711 | 1715 | ususuuAfcUfCfUf | 2343 | usCfsaccUfcAfAfaaga | 32.63 | |
| | | uuugagguga | | GfuAfaaasusu | | |
| 712 | 1716 | ususuaCfuCfUfUf | 2344 | usUfscacCfuCfAfaaag | 21.59 | |
| | | uugaggugaa | | AfgUfaaasusu | | |
| 713 | 1717 | ususacUfcUfUfUf | 2345 | usUfsucaCfcUfCfaaaa | 20.40 | |
| | | ugaggugaaa | | GfaGfuaasusu | | |
| 714 | 1718 | usascuCfuUfUfUf | 2346 | usAfsuucAfcCfUfcaaa | 19.61 | |
| | | gaggugaaua | | AfgAfguasusu | | |
| 781 | 1719 | gsgsucUfuCfAfCf | 2347 | usUfsgauAfcUfUfggugA | 21.71 | |
| | | caaguaucaa | | faGfaccsusu | | |
| 793 | 1720 | gsusauCfaAfAfGf | 2348 | usGfsuguUfaUfUfacuu | 15.87 | |
| | | uaauaacaca | | UfgAfuacsusu | | |
| 797 | 1721 | csasaaGfuAfAfUf | 2349 | usAfsuuuGfuGfUfuauu | 33.02 | |
| | | aacacaaaua | | AfcUfuugsusu | | |
| 800 | 1722 | asgsuaAfuAfAfCf | 2350 | usUfsucaUfuUfGfuguu | 30.01 | |
| | | acaaaugaaa | | AfuUfacususu | | |
| 842 | 1723 | usgsacUfcCfUfCf | 2351 | usAfsacaGfaUfGfugag | 26.50 | |
| | | acaucuguua | | GfaGfucasusu | | |
| 844 | 1724 | ascsucCfuCfAfCf | 2352 | usAfsuaaCfaGfAfugug | 26.91 | |
| | | aucuguuaua | | AfgGfagususu | | |
| 845 | 1725 | csusccUfcAfCfAf | 2353 | usGfsauaAfcAfGfaugu | 28.04 | |
| | | ucuguuauca | | GfaGfgagsusu | | |
| 846 | 1726 | uscscuCfaCfAfUf | 2354 | usAfsgauAfaCfAfgaugU | 31.11 | |
| | | cuguuaucua | | fgAfggasusu | | |
| 928 | 1727 | uscsuaUfgCfCfAf | 2355 | usAfsuguUfaAfUfguggC | 32.80 | |
| | | cauuaacaua | | faUfagasusu | | |
| 949 | 1728 | ususaaAfgUfUfGf | 2356 | usGfsauuCfuCfAfucaa | 23.97 | |
| | | augagaauca | | CfuUfuaasusu | | |
| 957 | 1729 | gsasugAfgAfAfUfc | 2357 | usCfscauAfcUfUfgauu | 28.03 | |
| | | aaguaugga | | CfuCfaucsusu | | |
| 958 | 1730 | asusgaGfaAfUfCf | 2358 | usUfsccaUfaCfUfugau | 31.29 | |
| | | aaguauggaa | | UfcUfcaususu | | |
| 960 | 1731 | gsasgaAfuCfAfAfg | 2359 | usUfsuucCfaUfAfcuug | 26.65 | |
| | | uauggaaaa | | AfuUfcucsusu | | |
| 961 | 1732 | asgsaaUfcAfAfGf | 2360 | usUfsuuuCfcAfUfacuu | 24.43 | |
| | | uauggaaaaa | | GfaUfucususu | | |
| 962 | 1733 | gsasauCfaAfGfUf | 2361 | usCfsuuuUfcCfAfuacu | 26.08 | |
| | | auggaaaaga | | UfgAfuucsusu | | |
| 963 | 1734 | asasucAfaGfUfAf | 2362 | usAfscuuUfuCfCfauac | 29.27 | |
| | | uggaaaagua | | UfuGfauususu | | |
| 964 | 1735 | asuscaAfgUfAfUf | 2363 | usUfsacuUfuUfCfcaua | 29.69 | |
| | | ggaaaaguaa | | CfuUfgaususu | | |
| 965 | 1736 | uscsaaGfuAfUfGf | 2364 | usUfsuacUfuUfUfccau | 29.12 | |
| | | gaaaaguaaa | | AfcUfugasusu | | |
| 966 | 1737 | csasagUfaUfGfGf | 2365 | usCfsuuaCfuUfUfucca | 32.99 | |
| | | aaaaguaaga | | UfaCfuugsusu | | |
| 967 | 1738 | asasguAfuGfGfAf | 2366 | usCfscuuAfcUfUfuucc | 43.38 | |
| | | aaaguaagga | | AfuAfcuususu | | |
| 968 | 1739 | asgsuaUfgGfAfAf | 2367 | usGfsccuUfaCfUfuuuc | 43.54 | |
| | | aaguaaggca | | CfaUfacususu | | |
| 969 | 1740 | gsusauGfgAfAfAf | 2368 | usGfsgccUfuAfCfuuuu | 29.74 | |
| | | aguaaggcca | | CfcAfuacsusu | | |
| 972 | 1741 | usgsgaAfaAfGfUf | 2369 | usUfsaugGfcCfUfuacu | 41.00 | |
| | | aaggccauaa | | UfuUfccasusu | | |
| 981 | 1742 | asasggCfcAfUfAf | 2370 | usAfsuguAfaGfAfguau | 36.69 | |
| | | cucuuacaua | | GfgCfcuususu | | |
| 985 | 1743 | cscsauAfcUfCfUf | 2371 | usUfsauuAfuGfUfaaga | 28.57 | |
| | | uacauaauaa | | GfuAfuggsusu | | |
| 1022 | 1744 | ususuuCfaAfAfGf | 2372 | usUfscugUfgAfUfucuu | 20.86 | |
| | | aaucacagaa | | UfgAfaaasusu | | |
| 1023 | 1745 | ususucAfaAfGfAf | 2373 | usUfsucuGfuGfAfuucu | 27.92 | |
| | | aucacagaaa | | UfuGfaaasusu | | |
| 1024 | 1746 | ususcaAfaGfAfAf | 2374 | usAfsuucUfgUfGfauuc | 26.51 | |
| | | ucacagaaua | | UfuUfgaasusu | | |
| 1031 | 1747 | asasucAfcAfGfAf | 2375 | usUfsacuAfgAfAfuucu | 29.31 | |
| | | auucuaguaa | | GfuGfauususu | | |
| 1032 | 1748 | asuscaCfaGfAfAf | 2376 | usGfsuacUfaGfAfauuc | 26.62 | |
| | | uucuaguaca | | UfgUfgaususu | | |
| 1061 | 1749 | uscsauAfaAfUfCf | 2377 | usCfsuuaGfaAfCfagau | 56.38 | |
| | | uguucuaaga | | UfuAfugasusu | | |
| 1062 | 1750 | csasuaAfaUfCfUf | 2378 | usUfscuuAfgAfAfcagaU | 37.11 | |
| | | guucuaagaa | | fuUfaugsusu | | |
| 1063 | 1751 | asusaaAfuCfUfGf | 2379 | usGfsucuUfaGfAfacag | 27.70 | |
| | | uucuaagaca | | AfuUfuaususu | | |
| 1064 | 1752 | usasaaUfcUfGfUf | 2380 | usUfsgucUfuAfGfaaca | 19.64 | |
| | | ucuaagacaa | | GfaUfuuasusu | | |
| 1067 | 1753 | asuscuGfuUfCfUf | 2381 | usAfsuauGfuCfUfuaga | 22.01 | |
| | | aagacauaua | | AfcAfgaususu | | |
| 1069 | 1754 | csusguUfcUfAfAf | 2382 | usUfscauAfuGfUfcuua | 25.10 | |
| | | gacauaugaa | | GfaAfcagsusu | | |
| 1070 | 1755 | usgsuuCfuAfAfGf | 2383 | usAfsucaUfaUfGfucuu | 26.79 | |
| | | acauaugaua | | AfgAfacasusu | | |
| 1074 | 1756 | csusaaGfaCfAfUf | 2384 | usGfsuugAfuCfAfuaug | 25.29 | |
| | | augaucaaca | | UfcUfuagsusu | | |
| 1075 | 1757 | usasagAfcAfUfAf | 2385 | usUfsguuGfaUfCfauau | 33.55 | |
| | | ugaucaacaa | | GfuCfuuasusu | | |
| 1080 | 1758 | csasuaUfgAfUfCf | 2386 | usUfscauCfuGfUfugau | 30.58 | |
| | | aacagaugaa | | CfaUfaugsusu | | |
| 1081 | 1759 | asusauGfaUfCfAf | 2387 | usCfsucaUfcUfGfuuga | 33.83 | |
| | | acagaugaga | | UfcAfuaususu | | |
| 1084 | 1760 | usgsauCfaAfCfAf | 2388 | usGfsuucUfcAfUfcugu | 29.23 | |
| | | gaugagaaca | | UfgAfucasusu | | |
| 1086 | 1761 | asuscaAfcAfGfAf | 2389 | usCfsaguUfcUfCfaucu | 32.48 | |
| | | ugagaacuga | | GfuUfgaususu | | |
| 1087 | 1762 | uscsaaCfaGfAfUf | 2390 | usCfscagUfuCfUfcauc | 28.02 | |
| | | gagaacugga | | UfgUfugasusu | | |
| 1120 | 1763 | asgsugAfgAfUfUf | 2391 | usGfsauaUfgAfCfuaau | 27.61 | |
| | | agucauauca | | CfuCfacususu | | |
| 1122 | 1764 | usgsagAfuUfAfGf | 2392 | usGfsugaUfaUfGfacua | 32.43 | |
| | | ucauaucaca | | AfuCfucasusu | | |
| 1136 | 1765 | uscsacUfaAfUfAf | 2393 | usUfsuguUfaGfUfauau | 27.28 | |
| | | uacuaacaaa | | UfaGfugasusu | | |
| 1178 | 1766 | ascsugUfaGfUfGf | 2394 | usCfsagaUfaAfUfucac | 33.31 | |
| | | aauuaucuga | | UfaCfagususu | | |
| 1179 | 1767 | csusguAfgUfGfAf | 2395 | usUfscagAfuAfAfuucaC | 30.55 | |
| | | auuaucugaa | | fuAfcagsusu | | |
| 1231 | 1768 | gsgsaaUfcAfUfGf | 2396 | usUfsuaaGfgUfUfucau | 29.75 | |
| | | aaaccuuaaa | | GfaUfuccsusu | | |
| 1232 | 1769 | gsasauCfaUfGfAf | 2397 | usCfsuuaAfgGfUfuuca | 25.68 | |
| | | aaccuuaaga | | UfgAfuucsusu | | |
| 1233 | 1770 | asasucAfuGfAfAf | 2398 | usUfscuuAfaGfGfuuuc | 28.47 | |
| | | accuuaagaa | | AfuGfauususu | | |
| 1234 | 1771 | asuscaUfgAfAfAf | 2399 | usGfsucuUfaAfGfguuu | 28.39 | |
| | | ccuuaagaca | | CfaUfgaususu | | |
| 1235 | 1772 | uscsauGfaAfAfCf | 2400 | usAfsgucUfuAfAfgguuU | 19.37 | |
| | | cuuaagacua | | fcAfugasusu | | |
| 1236 | 1773 | csasugAfaAfCfCf | 2401 | usAfsaguCfuUfAfaggu | 22.25 | |
| | | uuaagacuua | | UfuCfaugsusu | | |
| 1239 | 1774 | gsasaaCfcUfUfAf | 2402 | usCfsugaAfgUfCfuuaa | 24.33 | |
| | | agacuucaga | | GfgUfuucsusu | | |
| 1240 | 1775 | asasacCfuUfAfAf | 2403 | usUfscugAfaGfUfcuua | 17.79 | |
| | | gacuucagaa | | AfgGfuuususu | | |
| 1266 | 1776 | gscsagGfuUfGfUf | 2404 | usGfsaauGfgAfAfgacaA | 17.13 | |
| | | cuuccauuca | | fcCfugcsusu | | |
| 1267 | 1777 | csasggUfuGfUfCf | 2405 | usGfsgaaUfgGfAfagacA | 27.98 | |
| | | uuccauucca | | faCfcugsusu | | |
| 1268 | 1778 | asgsguUfgUfCfUf | 2406 | usUfsggaAfuGfGfaaga | 26.98 | |
| | | uccauuccaa | | CfaAfccususu | | |
| 1286 | 1779 | gscscuAfaCfAfUf | 2407 | usCfsugcAfuUfGfgaug | 30.83 | |
| | | ccaaugcaga | | UfuAfggcsusu | | |
| 1287 | 1780 | cscsuaAfcAfUfCf | 2408 | usCfscugCfaUfUfggau | 64.20 | |
| | | caaugcagga | | GfuUfaggsusu | | |
| 1288 | 1781 | csusaaCfaUfCfCf | 2409 | usGfsccuGfcAfUfugga | 44.20 | |
| | | aaugcaggca | | UfgUfuagsusu | | |
| 1289 | 1782 | usasacAfuCfCfAf | 2410 | usUfsgccUfgCfAfuuggA | 32.14 | |
| | | augcaggcaa | | fuGfuuasusu | | |
| 1290 | 1783 | asascaUfcCfAfAf | 2411 | usUfsugcCfuGfCfauug | 27.11 | |
| | | ugcaggcaaa | | GfaUfguususu | | |
| 1291 | 1784 | ascsauCfcAfAfUf | 2412 | usCfsuugCfcUfGfcauu | 38.29 | |
| | | gcaggcaaga | | GfgAfugususu | | |
| 1292 | 1785 | csasucCfaAfUfGf | 2413 | usCfscuuGfcCfUfgcau | 35.27 | |
| | | caggcaagga | | UfgGfaugsusu | | |
| 1293 | 1786 | asusccAfaUfGfCf | 2414 | usUfsccuUfgCfCfugca | 40.03 | |
| | | aggcaaggaa | | UfuGfgaususu | | |
| 1294 | 1787 | uscscaAfuGfCfAf | 2415 | usUfsuccUfuGfCfcugc | 31.21 | |
| | | ggcaaggaaa | | AfuUfggasusu | | |
| 1295 | 1788 | cscsaaUfgCfAfGf | 2416 | usUfsuucCfuUfGfccug | 25.76 | |
| | | gcaaggaaaa | | CfaUfuggsusu | | |
| 1296 | 1789 | csasauGfcAfGfGf | 2417 | usUfsuuuCfcUfUfgccu | 28.84 | |
| | | caaggaaaaa | | GfcAfuugsusu | | |
| 1297 | 1790 | asasugCfaGfGfCf | 2418 | usAfsuuuUfcCfUfugcc | 35.56 | |
| | | aaggaaaaua | | UfgCfauususu | | |
| 1304 | 1791 | gscsaaGfgAfAfAfa | 2419 | usAfsucuUfuUfAfuuuu | 39.65 | |
| | | uaaaagaua | | CfcUfugcsusu | | |
| 1312 | 1792 | asasuaAfaAfGfAf | 2420 | usCfsacuGfgAfAfaucu | 37.10 | |
| | | uuuccaguga | | UfuUfauususu | | |
| 1313 | 1793 | asusaaAfaGfAfUf | 2421 | usUfscacUfgGfAfaauc | 24.38 | |
| | | uuccagugaa | | UfuUfuaususu | | |
| 1314 | 1794 | usasaaAfgAfUfUf | 2422 | usGfsucaCfuGfGfaaau | 26.42 | |
| | | uccagugaca | | CfuUfuuasusu | | |
| 1315 | 1795 | asasaaGfaUfUfUf | 2423 | usUfsgucAfcUfGfgaaa | 26.96 | |
| | | ccagugacaa | | UfcUfuuususu | | |
| 1366 | 1796 | usasuaUfgAfAfUf | 2424 | usGfsgagAfgAfGfaauu | 28.41 | |
| | | ucucucucca | | CfaUfauasusu | | |
| 1367 | 1797 | asusauGfaAfUfUf | 2425 | usUfsggaGfaGfAfgaau | 19.93 | |
| | | cucucuccaa | | UfcAfuaususu | | |
| 1368 | 1798 | usasugAfaUfUfCf | 2426 | usUfsuggAfgAfGfagaaU | 18.78 | |
| | | ucucuccaaa | | fuCfauasusu | | |
| 1369 | 1799 | asusgaAfuUfCfUf | 2427 | usUfsuugGfaGfAfgaga | 33.99 | |
| | | cucuccaaaa | | AfuUfcaususu | | |
| 1370 | 1800 | usgsaaUfuCfUfCf | 2428 | usAfsuuuGfgAfGfagagA | 17.29 | |
| | | ucuccaaaua | | faUfucasusu | | |
| 1371 | 1801 | gsasauUfcUfCfUf | 2429 | usUfsauuUfgGfAfgaga | 24.77 | |
| | | cuccaaauaa | | GfaAfuucsusu | | |
| 1372 | 1802 | asasuuCfuCfUfCf | 2430 | usAfsuauUfuGfGfagag | 28.98 | |
| | | uccaaauaua | | AfgAfauususu | | |
| 1373 | 1803 | asusucUfcUfCfUf | 2431 | usAfsauaUfuUfGfgaga | 24.84 | |
| | | ccaaauauua | | GfaGfaaususu | | |
| 1412 | 1804 | ususgaAfaUfGfAf | 2432 | usCfscaaCfaAfGfuuca | 45.46 | |
| | | acuuguugga | | UfuUfcaasusu | | |
| 1414 | 1805 | gsasaaUfgAfAfCf | 2433 | usGfsgccAfaCfAfaguu | 49.27 | |
| | | uuguuggcca | | CfaUfuucsusu | | |
| 1415 | 1806 | asasauGfaAfCfUf | 2434 | usGfsggcCfaAfCfaagu | 51.78 | |
| | | uguuggccca | | UfcAfuuususu | | |
| 1416 | 1807 | asasugAfaCfUfUf | 2435 | usUfsgggCfcAfAfcaagU | 52.44 | |
| | | guuggcccaa | | fuCfauususu | | |
| 1421 | 1808 | ascsuuGfuUfGfGf | 2436 | usAfsuagAfuGfGfgccaA | 46.46 | |
| | | cccaucuaua | | fcAfagususu | | |
| 1423 | 1809 | ususguUfgGfCfCf | 2437 | usUfsaauAfgAfUfgggcC | 44.51 | |
| | | caucuauuaa | | faAfcaasusu | | |
| 1426 | 1810 | ususggCfcCfAfUf | 2438 | usAfsuguAfaUfAfgaugG | 61.92 | |
| | | cuauuacaua | | fgCfcaasusu | | |
| 1430 | 1811 | cscscaUfcUfAfUf | 2439 | usGfsuagAfuGfUfaaua | 27.96 | |
| | | uacaucuaca | | GfaUfgggsusu | | |
| 1431 | 1812 | cscsauCfuAfUfUf | 2440 | usUfsguaGfaUfGfuaau | 37.37 | |
| | | acaucuacaa | | AfgAfuggsusu | | |
| 1432 | 1813 | csasucUfaUfUfAf | 2441 | usCfsuguAfgAfUfguaa | 33.11 | |
| | | caucuacaga | | UfaGfaugsusu | | |
| 1433 | 1814 | asuscuAfuUfAfCf | 2442 | usGfscugUfaGfAfugua | 51.68 | |
| | | aucuacagca | | AfuAfgaususu | | |
| 1434 | 1815 | uscsuaUfuAfCfAf | 2443 | usAfsgcuGfuAfGfaugu | 46.70 | |
| | | ucuacagcua | | AfaUfagasusu | | |
| 1435 | 1816 | csusauUfaCfAfUf | 2444 | usCfsagcUfgUfAfgaug | 35.99 | |
| | | cuacagcuga | | UfaAfuagsusu | | |
| 1436 | 1817 | usasuuAfcAfUfCf | 2445 | usUfscagCfuGfUfagau | 74.77 | |
| | | uacagcugaa | | GfuAfauasusu | | |
| 1437 | 1818 | asusuaCfaUfCfUf | 2446 | usGfsucaGfcUfGfuaga | 43.34 | |
| | | acagcugaca | | UfgUfaaususu | | |
| 1438 | 1819 | ususacAfuCfUfAf | 2447 | usGfsgucAfgCfUfguagA | 39.40 | |
| | | cagcugacca | | fuGfuaasusu | | |
| 1439 | 1820 | usascaUfcUfAfCf | 2448 | usGfsgguCfaGfCfugua | 60.23 | |
| | | agcugaccca | | GfaUfguasusu | | |
| 1440 | 1821 | ascsauCfuAfCfAf | 2449 | usAfsgggUfcAfGfcuguA | 55.82 | |
| | | gcugacccua | | fgAfugususu | | |
| 1441 | 1822 | csasucUfaCfAfGf | 2450 | usAfsaggGfuCfAfgcugU | 49.19 | |
| | | cugacccuua | | faGfaugsusu | | |
| 1442 | 1823 | asuscuAfcAfGfCf | 2451 | usCfsaagGfgUfCfagcu | 50.31 | |
| | | ugacccuuga | | GfuAfgaususu | | |
| 1466 | 1824 | gsgsggUfuAfGfGf | 2452 | usGfsucaGfcUfCfcccu | 40.53 | |
| | | ggagcugaca | | AfaCfcccsusu | | |
| 1467 | 1825 | gsgsguUfaGfGfGf | 2453 | usUfsgucAfgCfUfcccc | 44.52 | |
| | | gagcugacaa | | UfaAfcccsusu | | |
| 1468 | 1826 | gsgsuuAfgGfGfGf | 2454 | usUfsuguCfaGfCfuccc | 37.16 | |
| | | agcugacaaa | | CfuAfaccsusu | | |
| 1469 | 1827 | gsusuaGfgGfGfAf | 2455 | usAfsuugUfcAfGfcucc | 25.04 | |
| | | gcugacaaua | | CfcUfaacsusu | | |
| 1498 | 1828 | csasaaAfuCfUfUf | 2456 | usUfsaggUfaGfUfuaag | 36.59 | |
| | | aacuaccuaa | | AfuUfuugsusu | | |
| 1501 | 1829 | asasucUfuAfAfCf | 2457 | usUfsauuAfgGfUfaguu | 38.49 | |
| | | uaccuaauaa | | AfaGfauususu | | |
| 1502 | 1830 | asuscuUfaAfCfUf | 2458 | usCfsuauUfaGfGfuagu | 32.27 | |
| | | accuaauaga | | UfaAfgaususu | | |
| 1505 | 1831 | ususaaCfuAfCfCf | 2459 | usAfsggcUfaUfUfagguA | 29.74 | |
| | | uaauagccua | | fgUfuaasusu | | |
| 1506 | 1832 | usasacUfaCfCfUf | 2460 | usUfsaggCfuAfUfuagg | 29.56 | |
| | | aauagccuaa | | UfaGfuuasusu | | |
| 1508 | 1833 | ascsuaCfcUfAfAf | 2461 | usAfsguaGfgCfUfauua | 33.87 | |
| | | uagccuacua | | GfgUfagususu | | |
| 1526 | 1834 | asusugAfcCfAfUf | 2462 | usGfsuaaGfgUfUfuaug | 31.60 | |
| | | aaaccuuaca | | GfuCfaaususu | | |
| 1527 | 1835 | ususgaCfcAfUfAf | 2463 | usAfsguaAfgGfUfuuau | 28.07 | |
| | | aaccuuacua | | GfgUfcaasusu | | |
| 1528 | 1836 | usgsacCfaUfAfAf | 2464 | usCfsaguAfaGfGfuuua | 27.44 | |
| | | accuuacuga | | UfgGfucasusu | | |
| 1529 | 1837 | gsasccAfuAfAfAfc | 2465 | usUfscagUfaAfGfguuu | 34.35 | |
| | | cuuacugaa | | AfuGfgucsusu | | |
| 1530 | 1838 | ascscaUfaAfAfCf | 2466 | usAfsucaGfuAfAfgguu | 32.28 | |
| | | cuuacugaua | | UfaUfggususu | | |
| 1531 | 1839 | cscsauAfaAfCfCf | 2467 | usUfsaucAfgUfAfagguU | 43.98 | |
| | | uuacugauaa | | fuAfuggsusu | | |
| 1532 | 1840 | csasuaAfaCfCfUf | 2468 | usUfsuauCfaGfUfaagg | 36.41 | |
| | | uacugauaaa | | UfuUfaugsusu | | |
| 1533 | 1841 | asusaaAfcCfUfUf | 2469 | usGfsuuaUfcAfGfuaag | 41.03 | |
| | | acugauaaca | | GfuUfuaususu | | |
| 1543 | 1842 | csusgaUfaAfCfAf | 2470 | usUfsacuGfuUfUfaugu | 45.77 | |
| | | uaaacaguaa | | UfaUfcagsusu | | |
| 1674 | 1843 | uscsauUfaAfAfUf | 2471 | usCfsccaCfuUfCfcauu | 33.95 | |
| | | ggaaguggga | | UfaAfugasusu | | |
| 1675 | 1844 | csasuuAfaAfUfGf | 2472 | usAfscccAfcUfUfccau | 29.44 | |
| | | gaagugggua | | UfuAfaugsusu | | |
| 1706 | 1845 | ususcaUfuCfUfCf | 2473 | usGfsaagAfcAfAfugagA | 40.93 | |
| | | auugucuuca | | faUfgaasusu | | |
| 1707 | 1846 | uscsauUfcUfCfAf | 2474 | usUfsgaaGfaCfAfauga | 38.43 | |
| | | uugucuucaa | | GfaAfugasusu | | |
| 1708 | 1847 | csasuuCfuCfAfUf | 2475 | usGfsugaAfgAfCfaaugA | 42.63 | |
| | | ugucuucaca | | fgAfaugsusu | | |
| 1711 | 1848 | uscsucAfuUfGfUf | 2476 | usAfsaugUfgAfAfgacaA | 45.77 | |
| | | cuucacauua | | fuGfagasusu | | |
| 1782 | 1849 | gsuscuUfgUfCfUf | 2477 | usAfscacCfcCfUfaaga | 36.00 | |
| | | uaggggugua | | CfaAfgacsusu | | |
| 1783 | 1850 | uscsuuGfuCfUfUf | 2478 | usCfsacaCfcCfCfuaag | 41.37 | |
| | | agggguguga | | AfcAfagasusu | | |
| 1817 | 1851 | asusauUfcAfUfGf | 2479 | usCfscacUfuAfUfacau | 49.18 | |
| | | uauaagugga | | GfaAfuaususu | | |
| 1822 | 1852 | csasugUfaUfAfAf | 2480 | usAfsgggUfcCfAfcuuaU | 57.50 | |
| | | guggacccua | | faCfaugsusu | | |
| 2000 | 1853 | asusuuUfcAfAfUf | 2481 | usAfsgagGfaGfAfaauu | 37.60 | |
| | | uucuccucua | | GfaAfaaususu | | |
| 2001 | 1854 | ususuuCfaAfUfUf | 2482 | usCfsagaGfgAfGfaaau | 41.61 | |
| | | ucuccucuga | | UfgAfaaasusu | | |
| 2002 | 1855 | ususucAfaUfUfUf | 2483 | usUfscagAfgGfAfgaaaU | 44.25 | |
| | | cuccucugaa | | fuGfaaasusu | | |
| 116 | 1856 | gsusuaUfcUfCfAf | 2484 | usAfsgccAfaAfUfaugaG | 25.28 | |
| | | uauuuggcua | | faUfaacsusu | | |
| 261 | 1857 | csasagCfaCfGfUf | 2485 | usUfsagcUfuUfUfgacg | 10.02 | |
| | | caaaagcuaa | | UfgCfuugsusu | | |
| 263 | 1858 | asgscaCfgUfCfAf | 2486 | usUfsguaGfcUfUfuuga | 18.61 | |
| | | aaagcuacaa | | CfgUfgcususu | | |
| 267 | 1859 | csgsucAfaAfAfGf | 2487 | usAfsuucUfgUfAfgcuu | 9.80 | |
| | | cuacagaaua | | UfuGfacgsusu | | |
| 268 | 1860 | gsuscaAfaAfGfCf | 2488 | usGfsauuCfuGfUfagcu | 6.35 | |
| | | uacagaauca | | UfuUfgacsusu | | |
| 534 | 1861 | usgsuaAfaCfAfUf | 2489 | usGfscccUfuUfUfcaug | 9.98 | |
| | | gaaaagggca | | UfuUfacasusu | | |
| 535 | 1862 | gsusaaAfcAfUfGf | 2490 | usAfsgccCfuUfUfucau | 14.77 | |
| | | aaaagggcua | | GfuUfuacsusu | | |
| 1089 | 1863 | asascaGfaUfGfAf | 2491 | usCfsaccAfgUfUfcuca | 41.56 | |
| | | gaacugguga | | UfcUfguususu | | |
| 1090 | 1864 | ascsagAfuGfAfGf | 2492 | usCfscacCfaGfUfucuc | 32.85 | |
| | | aacuggugga | | AfuCfugususu | | |
| 1091 | 1865 | csasgaUfgAfGfAf | 2493 | usAfsccaCfcAfGfuucu | 24.91 | |
| | | acugguggua | | CfaUfcugsusu | | |
| 1092 | 1866 | asgsauGfaGfAfAf | 2494 | usAfsaccAfcCfAfguucU | 20.21 | |
| | | cuggugguua | | fcAfucususu | | |
| 1093 | 1867 | gsasugAfgAfAfCfu | 2495 | usUfsaacCfaCfCfaguu | 18.42 | |
| | | ggugguuaa | | CfuCfaucsusu | | |
| 1094 | 1868 | asusgaGfaAfCfUf | 2496 | usUfsuaaCfcAfCfcagu | 23.41 | |
| | | ggugguuaaa | | UfcUfcaususu | | |
| 1095 | 1869 | usgsagAfaCfUfGf | 2497 | usAfsuuaAfcCfAfccagU | 23.27 | |
| | | gugguuaaua | | fuCfucasusu | | |
| 1096 | 1870 | gsasgaAfcUfGfGf | 2498 | usUfsauuAfaCfCfacca | 24.74 | |
| | | ugguuaauaa | | GfuUfcucsusu | | |
| 1097 | 1871 | asgsaaCfuGfGfUf | 2499 | usAfsuauUfaAfCfcacc | 27.87 | |
| | | gguuaauaua | | AfgUfucususu | | |
| 1228 | 1872 | ususugGfaAfUfCf | 2500 | usAfsgguUfuCfAfugau | 20.34 | |
| | | augaaaccua | | UfcCfaaasusu | | |
| 1229 | 1873 | ususggAfaUfCfAf | 2501 | usAfsaggUfuUfCfauga | 16.53 | |
| | | ugaaaccuua | | UfuCfcaasusu | | |
| 1614 | 1874 | asasguAfaGfCfUf | 2502 | usAfsuuuUfcUfCfuagc | 37.67 | |
| | | agagaaaaua | | UfuAfcuususu | | |
| 1615 | 1875 | asgsuaAfgCfUfAf | 2503 | usCfsauuUfuCfUfcuag | 32.79 | |
| | | gagaaaauga | | CfuUfacususu | | |
| 1616 | 1876 | gsusaaGfcUfAfGf | 2504 | usAfscauUfuUfCfucua | 34.14 | |
| | | agaaaaugua | | GfcUfuacsusu | | |
| 1673 | 1877 | ususcaUfuAfAfAf | 2505 | usCfscacUfuCfCfauuu | 31.62 | |
| | | uggaagugga | | AfaUfgaasusu | | |
| 1701 | 1878 | asasguCfuUfCfAf | 2506 | usCfsaauGfaGfAfauga | 51.66 | |
| | | uucucauuga | | AfgAfcuususu | | |
| 1702 | 1879 | asgsucUfuCfAfUf | 2507 | usAfscaaUfgAfGfaaugA | 48.04 | |
| | | ucucauugua | | faGfacususu | | |
| 1703 | 1880 | gsuscuUfcAfUfUf | 2508 | usGfsacaAfuGfAfgaau | 49.89 | |
| | | cucauuguca | | GfaAfgacsusu | | |
| 1704 | 1881 | uscsuuCfaUfUfCf | 2509 | usAfsgacAfaUfGfagaaU | 37.01 | |
| | | ucauugucua | | fgAfagasusu | | |
| 1784 | 1882 | csusugUfcUfUfAf | 2510 | usCfscacAfcCfCfcuaa | 46.42 | |
| | | ggggugugga | | GfaCfaagsusu | | |
| 1818 | 1883 | usasuuCfaUfGfUf | 2511 | usUfsccaCfuUfAfuaca | 51.32 | |
| | | auaaguggaa | | UfgAfauasusu | | |
| 1821 | 1884 | uscsauGfuAfUfAf | 2512 | usGfsgguCfcAfCfuuau | 54.84 | |
| | | aguggaccca | | AfcAfugasusu | | |
| 470 | 1402 | ususguGfaAfAfAf | 2513 | vpUsAfsucuUfgAfCfcu | 8.30 | 0.59 |
| | | ggucaagaua | | uuUfcAfcaasusu | | |
| 471 | 1403 | usgsugAfaAfAfGfg | 2514 | vpUsAfsaucUfuGfAfcc | 9.30 | 2.91 |
| | | ucaagauua | | uuUfuCfacasusu | | |
| 475 | 1404 | asasaaGfgUfCfAf | 2515 | vpUsUfscuuAfaUfCfuu | 13.70 | 21.27 |
| | | agauuaagaa | | gaCfcUfuuususu | | |
| 450 | 1471 | uscscuGfaGfUfAf | 2516 | vpUsAfsaacUfcUfUfcu | 10.00 | 12.81 |
| | | gaagaguuua | | acUfcAfggasusu | | |
| 452 | 1472 | csusgaGfuAfGfAf | 2517 | vpUsAfsgaaAfcUfCfuuc | 8.20 | 0.27 |
| | | agaguuucua | | uAfcUfcagsusu | | |
| 528 | 1474 | gsgsauCfuUfGfUf | 2518 | vpUsUfsucaUfgUfUfua | 11.10 | 5.04 |
| | | aaacaugaaa | | caAfgAfuccsusu | | |
| 381 | 1670 | gscsuuGfcCfAfCf | 2519 | vpUsUfsaagCfuGfAfug | 7.60 | 9.74 |
| | | aucagcuuaa | | ugGfcAfagcsusu | | |
| 382 | 1671 | csusugCfcAfCfAf | 2520 | vpUsUfsuaaGfcUfGfau | 7.50 | 3.44 |
| | | ucagcuuaaa | | guGfgCfaagsusu | | |
| 383 | 1672 | ususgcCfaCfAfUf | 2521 | vpUsUfsuuaAfgCfUfga | 8.40 | 2.73 |
| | | cagcuuaaaa | | ugUfgGfcaasusu | | |
| 472 | 1688 | gsusgaAfaAfGfGf | 2522 | vpUsUfsaauCfuUfGfac | 8.20 | 0.06 |
| | | ucaagauuaa | | cuUfuUfcacsusu | | |

TABLE 1C
provides exemplary siRNAs with the unmodified sequences of the sense strand
and the antisense strand.
Column 1 shows the beginning position of the target sequence in PLN_human_#_
NM_002667.5 (SEQ ID NO: 2523). The target sequence is 19 nucleotide long
starting from the beginning position. For example, row 1 shows that the
beginning position of the target sequence is 202, which means that the target
sequence is the sequence corresponding to positions 202-220 of PLN_human_#_
NM_002667.5 (SEQ ID NO: 2523). The sequences of the sense strands and
antisense strands are shown from the 5′ end to the 3′ end.

| | New | | New | |
|---|---|---|---|---|
| Position in | SEQ ID | | SEQ ID | |
| transcript | NO: | Sense strand | NO: | Antisense strand |
| 202 | 2524 | AAGUCCAAUACCUCACUCG | 2644 | CGAGUGAGGUAUUGGACUU |
| 1209 | 2525 | UAGCUUACCAUACUAUAUC | 2645 | GAUAUAGUAUGGUAAGCUA |
| 1211 | 2526 | GCUUACCAUACUAUAUCUU | 2646 | AAGAUAUAGUAUGGUAAGC |
| 1481 | 2527 | GACAAUUCGUGGGUCCGCA | 2647 | UGCGGACCCACGAAUUGUC |
| 2424 | 2528 | AGAUUUCUUAAGUGACGCC | 2648 | GGCGUCACUUAAGAAAUCU |
| 2430 | 2529 | CUUAAGUGACGCCUCAUCU | 2649 | AGAUGAGGCGUCACUUAAG |
| 42 | 2530 | CCCGUAAGACUUCAUACAA | 2650 | UUGUAUGAAGUCUUACGGG |
| 219 | 2531 | CGCUCAGCUAUAAGAAGAG | 2651 | CUCUUCUUAUAGCUGAGCG |
| 329 | 2532 | CUGUAUCAUCGUGAUGCUU | 2652 | AAGCAUCACGAUGAUACAG |
| 330 | 2533 | UGUAUCAUCGUGAUGCUUC | 2653 | GAAGCAUCACGAUGAUACA |
| 1130 | 2534 | GUCAUAUCACUAAUAUACU | 2654 | AGUAUAUUAGUGAUAUGAC |
| 1202 | 2535 | AGUUACCUAGCUUACCAUA | 2655 | UAUGGUAAGCUAGGUAACU |
| 1503 | 2536 | UCUUAACUACCUAAUAGCC | 2656 | GGCUAUUAGGUAGUUAAGA |
| 1504 | 2537 | CUUAACUACCUAAUAGCCU | 2657 | AGGCUAUUAGGUAGUUAAG |
| 1900 | 2538 | CUCUAUCAACCAAAUGGUA | 2658 | UACCAUUUGGUUGAUAGAG |
| 1906 | 2539 | CAACCAAAUGGUAAGCAUC | 2659 | GAUGCUUACCAUUUGGUUG |
| 1939 | 2540 | CUCUACUGAGCUAAAUUAU | 2660 | AUAAUUUAGCUCAGUAGAG |
| 1940 | 2541 | UCUACUGAGCUAAAUUAUA | 2661 | UAUAAUUUAGCUCAGUAGA |
| 1948 | 2542 | GCUAAAUUAUAGAUCCAGC | 2662 | GCUGGAUCUAUAAUUUAGC |
| 2301 | 2543 | ACACAAGUGUUGCUAACUC | 2663 | GAGUUAGCAACACUUGUGU |
| 2309 | 2544 | GUUGCUAACUCAAUAGUGA | 2664 | UCACUAUUGAGUUAGCAAC |
| 2425 | 2545 | GAUUUCUUAAGUGACGCCU | 2665 | AGGCGUCACUUAAGAAAUC |
| 2429 | 2546 | UCUUAAGUGACGCCUCAUC | 2666 | GAUGAGGCGUCACUUAAGA |
| 2431 | 2547 | UUAAGUGACGCCUCAUCUA | 2667 | UAGAUGAGGCGUCACUUAA |
| 226 | 2548 | CUAUAAGAAGAGCCUCAAC | 2668 | GUUGAGGCUCUUCUUAUAG |
| 227 | 2549 | UAUAAGAAGAGCCUCAACC | 2669 | GGUUGAGGCUCUUCUUAUA |
| 228 | 2550 | AUAAGAAGAGCCUCAACCA | 2670 | UGGUUGAGGCUCUUCUUAU |
| 260 | 2551 | ACAAGCACGUCAAAAGCUA | 2671 | UAGCUUUUGACGUGCUUGU |
| 276 | 2552 | CUACAGAAUCUAUUUAUCA | 2672 | UGAUAAAUAGAUUCUGUAG |
| 667 | 2553 | AAAACUGCACUGCCAACAA | 2673 | UUGUUGGCAGUGCAGUUUU |
| 668 | 2554 | AAACUGCACUGCCAACAAG | 2674 | CUUGUUGGCAGUGCAGUUU |
| 959 | 2555 | UGAGAAUCAAGUAUGGAAA | 2675 | UUUCCAUACUUGAUUCUCA |
| 1099 | 2556 | AACUGGUGGUUAAUAUGUG | 2676 | CACAUAUUAACCACCAGUU |
| 1100 | 2557 | ACUGGUGGUUAAUAUGUGA | 2677 | UCACAUAUUAACCACCAGU |
| 1590 | 2558 | AUUAUACACUAUAUUCCUA | 2678 | UAGGAAUAUAGUGUAUAAU |
| 2522 | 2559 | GUAAAUUACCAAUACAGAA | 2679 | UUCUGUAUUGGUAAUUUAC |
| 2576 | 2560 | AACUGAUUAGUCAUAUUCC | 2680 | GGAAUAUGACUAAUCAGUU |
| 2837 | 2561 | ACUAUAGAAUAAGUUCUUA | 2681 | UAAGAACUUAUUCUAUAGU |
| 225 | 2562 | GCUAUAAGAAGAGCCUCAA | 2682 | UUGAGGCUCUUCUUAUAGC |
| 476 | 2563 | AAAGGUCAAGAUUAAGACU | 2683 | AGUCUUAAUCUUGACCUUU |
| 477 | 2564 | AAGGUCAAGAUUAAGACUA | 2684 | UAGUCUUAAUCUUGACCUU |
| 484 | 2565 | AGAUUAAGACUAAAACUUA | 2685 | UAAGUUUUAGUCUUAAUCU |
| 809 | 2566 | ACAAAUGAAGUGUCAUUAU | 2686 | AUAAUGACACUUCAUUUGU |
| 617 | 2567 | CUCACAAAUUUCUAUCCCA | 2687 | UGGGAUAGAAAUUUGUGAG |
| 666 | 2568 | UAAAACUGCACUGCCAACA | 2688 | UGUUGGCAGUGCAGUUUUA |
| 669 | 2569 | AACUGCACUGCCAACAAGU | 2689 | ACUUGUUGGCAGUGCAGUU |
| 274 | 2570 | AGCUACAGAAUCUAUUUAU | 2690 | AUAAAUAGAUUCUGUAGCU |
| 275 | 2571 | GCUACAGAAUCUAUUUAUC | 2691 | GAUAAAUAGAUUCUGUAGC |
| 1098 | 2572 | AAAACUUAUUGUUACCAUA | 2692 | UAUGGUAACAAUAAGUUUU |
| 1101 | 2573 | GAACUGGUGGUUAAUAUGU | 2693 | ACAUAUUAACCACCAGUUC |
| 1413 | 2574 | AACUGGUGGUUAAUAUGUG | 2694 | CACAUAUUAACCACCAGUU |
| 1483 | 2575 | ACUGGUGGUUAAUAUGUGA | 2695 | UCACAUAUUAACCACCAGU |
| 1484 | 2576 | CUGGUGGUUAAUAUGUGAC | 2696 | GUCACAUAUUAACCACCAG |
| 1485 | 2577 | AUUCGUGGGUCCGCAAAAU | 2697 | AUUUUGCGGACCCACGAAU |
| 1600 | 2578 | AUAUUCCUACAAUAAAGUA | 2698 | UACUUUAUUGUAGGAAUAU |
| 1876 | 2579 | AAUAGGAUAUAGCUAUUUU | 2699 | AAAAUAGCUAUAUCCUAUU |
| 1933 | 2580 | AGUCCACUCUACUGAGCUA | 2700 | UAGCUCAGUAGAGUGGACU |
| 2158 | 2581 | AUAAUCCAACAAUUUUAAU | 2701 | AUUAAAAUUGUUGGAUUAU |
| 2269 | 2582 | AUAUGUAACAUCAAUAUUG | 2702 | CAAUAUUGAUGUUACAUAU |
| 2349 | 2583 | UGAACCCAUGAGAGAUACU | 2703 | AGUAUCUCUCAUGGGUUCA |
| 2856 | 2584 | UCUUAAUUUACAGGGCACU | 2704 | AGUGCCCUGUAAAUUAAGA |
| 2857 | 2585 | CUUAAUUUACAGGGCACUA | 2705 | UAGUGCCCUGUAAAUUAAG |
| 278 | 2586 | ACAGAAUCUAUUUAUCAAU | 2706 | AUUGAUAAAUAGAUUCUGU |
| 2692 | 2587 | UGAGGAUUACAGAAUACUA | 2707 | UAGUAUUCUGUAAUCCUCA |
| 757 | 2588 | UUCUUUAAUACUAAGUAUU | 2708 | AAUACUUAGUAUUAAAGAA |
| 1379 | 2589 | UCUCCAAAUAUUAACUAAU | 2709 | AUUAGUUAAUAUUUGGAGA |
| 2220 | 2590 | UAGAGGAUGUGUAAUUAAC | 2710 | GUUAAUUACACAUCCUCUA |
| 2102 | 2591 | AAUUUAAGUUGACUAAAGU | 2711 | ACUUUAGUCAACUUAAAUU |
| 2690 | 2592 | UGUGAGGAUUACAGAAUAC | 2712 | GUAUUCUGUAAUCCUCACA |
| 52 | 2593 | UUCAUACAACACAAUACUC | 2713 | GAGUAUUGUGUUGUAUGAA |
| 1380 | 2594 | CUCCAAAUAUUAACUAAUU | 2714 | AAUUAGUUAAUAUUUGGAG |
| 1132 | 2595 | CAUAUCACUAAUAUACUAA | 2715 | UUAGUAUAUUAGUGAUAUG |
| 1126 | 2596 | AUUAGUCAUAUCACUAAUA | 2716 | UAUUAGUGAUAUGACUAAU |
| 281 | 2597 | GAAUCUAUUUAUCAAUUUC | 2717 | GAAAUUGAUAAAUAGAUUC |
| 2232 | 2598 | AAUUAACCAUAUCUUCUAA | 2718 | UUAGAAGAUAUGGUUAAUU |
| 2219 | 2599 | GUAGAGGAUGUGUAAUUAA | 2719 | UUAAUUACACAUCCUCUAC |
| 199 | 2600 | AGAAAGUCCAAUACCUCAC | 2720 | GUGAGGUAUUGGACUUUCU |
| 2093 | 2601 | AACUUUGGUAAUUUAAGUU | 2721 | AACUUAAAUUACCAAAGUU |
| 1378 | 2602 | CUCUCCAAAUAUUAACUAA | 2722 | UUAGUUAAUAUUUGGAGAG |
| 2840 | 2603 | AUAGAAUAAGUUCUUAUCU | 2723 | AGAUAAGAACUUAUUCUAU |
| 1134 | 2604 | UAUCACUAAUAUACUAACA | 2724 | UGUUAGUAUAUUAGUGAUA |
| 2222 | 2605 | GAGGAUGUGUAAUUAACCA | 2725 | UGGUUAAUUACACAUCCUC |
| 2703 | 2606 | GAAUACUAUAACUCAAAUU | 2726 | AAUUUGAGUUAUAGUAUUC |
| 358 | 2607 | CUGCUACAACCUCUAGAUC | 2727 | GAUCUAGAGGUUGUAGCAG |
| 285 | 2608 | CUAUUUAUCAAUUUCUGUC | 2728 | GACAGAAAUUGAUAAAUAG |
| 2184 | 2609 | GAAGACAUGUUACUAAUAU | 2729 | AUAUUAGUAACAUGUCUUC |
| 1377 | 2610 | UCUCUCCAAAUAUUAACUA | 2730 | UAGUUAAUAUUUGGAGAGA |
| 359 | 2611 | UGCUACAACCUCUAGAUCU | 2731 | AGAUCUAGAGGUUGUAGCA |
| 194 | 2612 | CAUGGAGAAAGUCCAAUAC | 2732 | GUAUUGGACUUUCUCCAUG |
| 888 | 2613 | ACUAUCAGAAUCUACAUUC | 2733 | GAAUGUAGAUUCUGAUAGU |
| 193 | 2614 | UCAUGGAGAAAGUCCAAUA | 2734 | UAUUGGACUUUCUCCAUGA |
| 116 | 2615 | GUUAUCUCAUAUUUGGCUA | 2735 | UAGCCAAAUAUGAGAUAAC |
| 261 | 2616 | CAAGCACGUCAAAAGCUAA | 2736 | UUAGCUUUUGACGUGCUUG |
| 263 | 2617 | AGCACGUCAAAAGCUACAA | 2737 | UUGUAGCUUUUGACGUGCU |
| 267 | 2618 | CGUCAAAAGCUACAGAAUA | 2738 | UAUUCUGUAGCUUUUGACG |
| 268 | 2619 | GUCAAAAGCUACAGAAUCA | 2739 | UGAUUCUGUAGCUUUUGAC |
| 534 | 2620 | UGUAAACAUGAAAAGGGCA | 2740 | UGCCCUUUUCAUGUUUACA |
| 535 | 2621 | GUAAACAUGAAAAGGGCUA | 2741 | UAGCCCUUUUCAUGUUUAC |
| 1089 | 2622 | AACAGAUGAGAACUGGUGA | 2742 | UCACCAGUUCUCAUCUGUU |
| 1090 | 2623 | ACAGAUGAGAACUGGUGGA | 2743 | UCCACCAGUUCUCAUCUGU |
| 1091 | 2624 | CAGAUGAGAACUGGUGGUA | 2744 | UACCACCAGUUCUCAUCUG |
| 1092 | 2625 | AGAUGAGAACUGGUGGUUA | 2745 | UAACCACCAGUUCUCAUCU |
| 1093 | 2626 | GAUGAGAACUGGUGGUUAA | 2746 | UUAACCACCAGUUCUCAUC |
| 1094 | 2627 | AUGAGAACUGGUGGUUAAA | 2747 | UUUAACCACCAGUUCUCAU |
| 1095 | 2628 | UGAGAACUGGUGGUUAAUA | 2748 | UAUUAACCACCAGUUCUCA |
| 1096 | 2629 | GAGAACUGGUGGUUAAUAA | 2749 | UUAUUAACCACCAGUUCUC |
| 1097 | 2630 | AGAACUGGUGGUUAAUAUA | 2750 | UAUAUUAACCACCAGUUCU |
| 1228 | 2631 | UUUGGAAUCAUGAAACCUA | 2751 | UAGGUUUCAUGAUUCCAAA |
| 1229 | 2632 | UUGGAAUCAUGAAACCUUA | 2752 | UAAGGUUUCAUGAUUCCAA |
| 1614 | 2633 | AAGUAAGCUAGAGAAAAUA | 2753 | UAUUUUCUCUAGCUUACUU |
| 1615 | 2634 | AGUAAGCUAGAGAAAAUGA | 2754 | UCAUUUUCUCUAGCUUACU |
| 1616 | 2635 | GUAAGCUAGAGAAAAUGUA | 2755 | UACAUUUUCUCUAGCUUAC |
| 1673 | 2636 | UUCAUUAAAUGGAAGUGGA | 2756 | UCCACUUCCAUUUAAUGAA |
| 1701 | 2637 | AAGUCUUCAUUCUCAUUGA | 2757 | UCAAUGAGAAUGAAGACUU |
| 1702 | 2638 | AGUCUUCAUUCUCAUUGUA | 2758 | UACAAUGAGAAUGAAGACU |
| 1703 | 2639 | GUCUUCAUUCUCAUUGUCA | 2759 | UGACAAUGAGAAUGAAGAC |
| 1704 | 2640 | UCUUCAUUCUCAUUGUCUA | 2760 | UAGACAAUGAGAAUGAAGA |
| 1784 | 2641 | CUUGUCUUAGGGGUGUGGA | 2761 | UCCACACCCCUAAGACAAG |
| 1818 | 2642 | UAUUCAUGUAUAAGUGGAA | 2762 | UUCCACUUAUACAUGAAUA |
| 1821 | 2643 | UCAUGUAUAAGUGGACCCA | 2763 | UGGGUCCACUUAUACAUGA |

TABLE 2
List of abbreviations of nucleotides used in the nucleic
acid sequences disclosed herein, e.g., in Table 1B

| Abbreviation | Nucleotide(s) |
|---|---|
| A | adenosine-3′-phosphate |
| Af | 2′-deoxy-2′-fluoro-adenosine-3′-phosphate |
| Afs | 2′-deoxy-2′-fluoro-adenosine-3′-phosphorothioate |
| As | adenosine-3′-phosphorothioate |
| C | cytidine-3′-phosphate |
| Cf | 2′-deoxy-2′-fluoro-cytidine-3′-phosphate |
| Cfs | 2′-deoxy-2′-fluoro-cytidine-3′-phosphorothioate |
| Cs | cytidine-3′-phosphorothioate |
| G | guanosine-3′-phosphate |
| Gf | 2′-deoxy-2′-fluoro-guanosine-3′-phosphate |
| Gfs | 2′-deoxy-2′-fluoro-guanosine-3′-phosphorothioate |
| Gs | guanosine-3′-phosphorothioate |
| U | uridine-3′-phosphate |
| Uf | 2′-deoxy-2′-fluoro-uridine-3′-phosphate |
| Ufs | 2′-deoxy-2′-fluoro-uridine-3′-phosphorothioate |
| Us | uridine-3′-phosphorothioate |
| a | 2′-O-methyl-adenosine-3′-phosphate |
| as | 2′-O-methyl-adenosine-3′-phosphorothioate |
| c | 2′-O-methyl-cytidine-3′-phosphate |
| cs | 2′-O-methyl-cytidine-3′-phosphorothioate |
| g | 2′-O-methyl-guanosine-3′-phosphate |
| gs | 2′-O-methyl-guanosine-3′-phosphorothioate |
| u | 2′-O-methyl-uridine-3′-phosphate |
| us | 2′-O-methyl-uridine-3′-phosphorothioate |
| T | deoxythymidine-3′-phosphate |
| vpUs | 5′-vinylphosphonate-2′-O-methyl-uridine-3′- |
| | phosphorothioate |

TABLE 3
Exemplary sequences of PLN mRNA transcript

| SEQ ID | |
|---|---|
| NO: | Sequence |
| 2523 | NM_002667.5 Homo sapiens phospholamban (PLN), mRNA: |
| | ATAAACTGGGTGACAGAGTCAGAAAACTCCCCAGCTAAACACCCGTAAGACTTCA |
| | TACAACACAATACTCTATACTGTGATGATCACAGCTGCCAAGGCTACCTAAAAGAA |
| | GACAGTTATCTCATATTTGGCTGCCAGCTTTTTATCTTTCTCTCGACCACTTAAAAC |
| | TTCAGACTTCCTGTCCTGCTGGTATCATGGAGAAAGTCCAATACCTCACTCGCTCA |
| | GCTATAAGAAGAGCCTCAACCATTGAAATGCCTCAACAAGCACGTCAAAAGCTACA |
| | GAATCTATTTATCAATTTCTGTCTCATCTTAATATGTCTCTTGCTGATCTGTATCATC |
| | GTGATGCTTCTCTGAAGTTCTGCTACAACCTCTAGATCTGCAGCTTGCCACATCAG |
| | CTTAAAATCTGTCATCCCATGCAGACAGGAAAACAATATTGTATAACAGACCACTT |
| | CCTGAGTAGAAGAGTTTCTTTGTGAAAAGGTCAAGATTAAGACTAAAACTTATTGTT |
| | ACCATATGTATTCATCTGTTGGATCTTGTAAACATGAAAAGGGCTTTATTTTCAAAA |
| | ATTAACTTCAAAATAAGTGTATAAAATGCAACTGTTGATTTCCTCAACATGGCTCAC |
| | AAATTTCTATCCCAAATCTTTTCTGAAGATGAAGAGTTTAGTTTTAAAACTGCACTG |
| | CCAACAAGTTCACTTCATATATAAAGCATTATTTTTACTCTTTTGAGGTGAATATAAT |
| | TTATATTACAATGTAAAAGCTTCTTTAATACTAAGTATTTTTCAGGTCTTCACCAAGT |
| | ATCAAAGTAATAACACAAATGAAGTGTCATTATTCAAAATAGTCCACTGACTCCTCA |
| | CATCTGTTATCTTATTATAAAGAACTATTTGTAGTAACTATCAGAATCTACATTCTAA |
| | AACAGAAATTGTATTTTTTCTATGCCACATTAACATCTTTTAAAGTTGATGAGAATCA |
| | AGTATGGAAAAGTAAGGCCATACTCTTACATAATAAAATTCCTTTTAAGTAATTTTTT |
| | CAAAGAATCACAGAATTCTAGTACATGTAGGTAAATCATAAATCTGTTCTAAGACAT |
| | ATGATCAACAGATGAGAACTGGTGGTTAATATGTGACAGTGAGATTAGTCATATCA |
| | CTAATATACTAACAACAGAATCTAATCTTCATTTAAGGCACTGTAGTGAATTATCTG |
| | AGCTAGAGTTACCTAGCTTACCATACTATATCTTTGGAATCATGAAACCTTAAGACT |
| | TCAGAATGATTTTGCAGGTTGTCTTCCATTCCAGCCTAACATCCAATGCAGGCAAG |
| | GAAAATAAAAGATTTCCAGTGACAGAAAAATATATTATCTCAAGTATTTTTTAAAAAT |
| | ATATGAATTCTCTCTCCAAATATTAACTAATTATTAGATTATATTTTGAAATGAACTT |
| | GTTGGCCCATCTATTACATCTACAGCTGACCCTTGAACATGGGGGTTAGGGGAGC |
| | TGACAATTCGTGGGTCCGCAAAATCTTAACTACCTAATAGCCTACTATTGACCATA |
| | AACCTTACTGATAACATAAACAGTAAATTAACACATATTTTGCGTGTTATATGTATTA |
| | TACACTATATTCCTACAATAAAGTAAGCTAGAGAAAATGTTATTTAGAAAATCATAA |
| | GAAAGAGAAAATATATTTACTATTCATTAAATGGAAGTGGGTCAACATAAAAGTCTT |
| | CATTCTCATTGTCTTCACATTGAGTAGGCAGAGGAGGAGAAAGATGGGGAGGAAG |
| | AGAAGGCGTTGGTCTTGCAGTCTTGTCTTAGGGGTGTGGGGAGTGGGGGAAAGA |
| | ATATTCATGTATAAGTGGACCCTTGCAATTCAAGCCCTTGTTGTTCAAGGGTCAAC |
| | TGTAATAGGATATAGCTATTTTTCTTCCTCTATCAACCAAATGGTAAGCATCTATTTT |
| | GCAGTCCACTCTACTGAGCTAAATTATAGATCCAGCTATGCTATTTATAATTATTTT |
| | CTTGATGAATAAATTTTCAATTTCTCCTCTGACCATTTCAGAACATCTTCCAATAACT |
| | CATAAAACAACTGAAGTAAAATTGAGTGCTGGAAAATATATTCACCAAACTTTGGTA |
| | ATTTAAGTTGACTAAAGTTTAAAATTAAGTCTAAAATAGTTTACACCTATACTGCATA |
| | ATCCAACAATTTTAATTTCAGTTGAAGACATGTTACTAATATAACTATTATTAAAAGA |
| | GTAGAGGATGTGTAATTAACCATATCTTCTAAAACATGGTTACTAAAAGAATATGTA |
| | ACATCAATATTGACCTTGGTTTCTTACACAAGTGTTGCTAACTCAATAGTGAAGGA |
| | GACACTATTAAATTTTCTGAACCCATGAGAGATACTAGAGATGGGGAGTGGAAAGT |
| | GTTTGGTTCAGGGATATCTGAAGAACAGAAGGGCAGAGATTTCTTAAGTGACGCC |
| | TCATCTACAAGCTGGAAATTCCTAAAAACAAGTAGAAAGCTTATAAACAACAGGTG |
| | ATACACTCACCTCACTGGTTTTAGTAAATTACCAATACAGAAAGTATCCCTAGTCTT |
| | AAAAACAAGTGGAAAATTTGAACTGATTAGTCATATTCCTTTGATTACACTGTTTGT |
| | TACAATATTTTTCTCAGTAAACAGAAATAACTAATTTTTTTGTTCTTCATTCTTTGATA |
| | GAAATTAAAATCTTATTCTGTGAGGATTACAGAATACTATAACTCAAATTATAAAGT |
| | AGAATAAACTCTTTAAATAATTATTCTTCATCATAAAGTGTAAAGAATAAGATATAAG |
| | AAAACAATTTATTTTTAAAATTTAATATACTAAATGCTCAAATATGTTCTACTATAGA |
| | ATAAGTTCTTATCTTAATTTACAGGGCACTAAAAACAATTTTAAAATGCTTAATGTTG |
| | CCTTTTATATTTTAATTGGTTAAGAATATATATTTGTTTAATGCAAATCAGAATCACT |
| | ATATTAAAATGAATGTTCTTGAAAACTCA |

[0385] Table 4 provides targeting positions with SEQ ID NO: 2523 (NM_002667.5) for an oligonucleotide of the present disclosure. In some embodiments, an oligonucleotide targets a sequence corresponding to positions selected from Table 4. In some embodiments, an oligonucleotide targets a sequence corresponding to positions selected from 470-488, 471-489, 475-493, 450-468, 452-470, 528-546, 381-399, 382-400, 383-401, and 472-490 of SEQ ID NO: 2523 (NM_{M}002667.5).

```
TABLE 4
Targeting positions
17-35
18-36
19-37
20-38
21-39
42-60
45-63
47-65
48-66
49-67
52-70
54-72
55-73
  91-109
  94-112
  95-113
  96-114
  97-115
  98-116
  99-117
100-118
101-119
102-120
103-121
104-122
105-123
106-124
107-125
108-126
109-127
110-128
111-129
112-130
113-131
114-132
115-133
116-134
161-179
163-181
181-199
182-200
183-201
184-202
185-203
186-204
187-205
188-206
189-207
193-211
194-212
195-213
197-215
198-216
199-217
200-218
201-219
202-220
203-221
204-222
205-223
206-224
207-225
209-227
210-228
211-229
212-230
213-231
214-232
215-233
217-235
219-237
221-239
222-240
223-241
224-242
225-243
226-244
227-245
228-246
229-247
230-248
231-249
232-250
233-251
234-252
237-255
240-258
244-262
248-266
249-267
250-268
251-269
252-270
253-271
254-272
255-273
256-274
257-275
260-278
261-279
263-281
264-282
267-285
268-286
274-292
275-293
276-294
278-296
281-299
285-303
290-308
291-309
292-310
293-311
296-314
297-315
298-316
299-317
300-318
301-319
302-320
303-321
304-322
305-323
306-324
307-325
308-326
309-327
310-328
311-329
312-330
313-331
314-332
315-333
316-334
317-335
318-336
319-337
320-338
321-339
322-340
323-341
324-342
325-343
326-344
327-345
328-346
329-347
330-348
331-349
334-352
335-353
336-354
337-355
338-356
341-359
342-360
346-364
347-365
348-366
349-367
350-368
351-369
352-370
353-371
354-372
355-373
356-374
357-375
358-376
359-377
360-378
361-379
362-380
363-381
381-399
382-400
383-401
387-405
388-406
389-407
390-408
391-409
392-410
393-411
394-412
399-417
400-418
402-420
438-456
440-458
441-459
442-460
443-461
446-464
449-467
450-468
451-469
452-470
469-487
470-488
471-489
472-490
473-491
474-492
475-493
476-494
477-495
478-496
479-497
480-498
481-499
482-500
483-501
484-502
521-539
522-540
523-541
524-542
525-543
526-544
527-545
528-546
531-549
532-550
533-551
534-552
535-553
537-555
538-556
593-611
595-613
598-616
600-618
601-619
602-620
604-622
605-623
606-624
607-625
608-626
609-627
610-628
617-635
618-636
623-641
624-642
628-646
630-648
631-649
639-657
640-658
641-659
642-660
643-661
644-662
645-663
646-664
666-684
667-685
668-686
669-687
670-688
671-689
672-690
673-691
674-692
675-693
676-694
677-695
679-697
680-698
681-699
682-700
683-701
684-702
687-705
688-706
689-707
690-708
711-729
712-730
713-731
714-732
715-733
716-734
717-735
718-736
757-775
776-794
777-795
778-796
779-797
780-798
781-799
782-800
783-801
784-802
785-803
786-804
787-805
788-806
789-807
790-808
791-809
792-810
793-811
797-815
800-818
803-821
809-827
810-828
811-829
812-830
813-831
838-856
839-857
842-860
844-862
845-863
846-864
848-866
849-867
850-868
872-890
873-891
876-894
877-895
878-896
882-900
883-901
886-904
888-906
889-907
926-944
928-946
949-967
950-968
951-969
952-970
953-971
957-975
958-976
959-977
960-978
961-979
962-980
963-981
964-982
965-983
966-984
967-985
968-986
969-987
972-990
978-996
979-997
980-998
981-999
  983-1001
  984-1002
  985-1003
1022-1040
1023-1041
1024-1042
1031-1049
1032-1050
1061-1079
1062-1080
1063-1081
1064-1082
1066-1084
1067-1085
1068-1086
1069-1087
1070-1088
1071-1089
1072-1090
1073-1091
1074-1092
1075-1093
1077-1095
1078-1096
1079-1097
1080-1098
1081-1099
1082-1100
1083-1101
1084-1102
1086-1104
1087-1105
1089-1107
1090-1108
1091-1109
1092-1110
1093-1111
1094-1112
1095-1113
1096-1114
1097-1115
1098-1116
1099-1117
1100-1118
1101-1119
1118-1136
1119-1137
1120-1138
1121-1139
1122-1140
1126-1144
1130-1148
1132-1150
1134-1152
1136-1154
1178-1196
1179-1197
1202-1220
1205-1223
1206-1224
1207-1225
1208-1226
1209-1227
1210-1228
1211-1229
1228-1246
1229-1247
1231-1249
1232-1250
1233-1251
1234-1252
1235-1253
1236-1254
1239-1257
1240-1258
1266-1284
1267-1285
1268-1286
1286-1304
1287-1305
1288-1306
1289-1307
1290-1308
1291-1309
1292-1310
1293-1311
1294-1312
1295-1313
1296-1314
1297-1315
1304-1322
1312-1330
1313-1331
1314-1332
1315-1333
1366-1384
1367-1385
1368-1386
1369-1387
1370-1388
1371-1389
1372-1390
1373-1391
1375-1393
1377-1395
1378-1396
1379-1397
1380-1398
1412-1430
1413-1431
1414-1432
1415-1433
1416-1434
1417-1435
1418-1436
1419-1437
1420-1438
1421-1439
1422-1440
1423-1441
1424-1442
1426-1444
1430-1448
1431-1449
1432-1450
1433-1451
1434-1452
1435-1453
1436-1454
1437-1455
1438-1456
1439-1457
1440-1458
1441-1459
1442-1460
1466-1484
1467-1485
1468-1486
1469-1487
1481-1499
1483-1501
1484-1502
1485-1503
1498-1516
1501-1519
1502-1520
1503-1521
1504-1522
1505-1523
1506-1524
1508-1526
1526-1544
1527-1545
1528-1546
1529-1547
1530-1548
1531-1549
1532-1550
1533-1551
1543-1561
1590-1608
1600-1618
1614-1632
1615-1633
1616-1634
1673-1691
1674-1692
1675-1693
1701-1719
1702-1720
1703-1721
1704-1722
1706-1724
1707-1725
1708-1726
1711-1729
1782-1800
1783-1801
1784-1802
1817-1835
1818-1836
1821-1839
1822-1840
1876-1894
1900-1918
1906-1924
1933-1951
1939-1957
1940-1958
1948-1966
1956-1974
1957-1975
1958-1976
2000-2018
2001-2019
2002-2020
2025-2043
2030-2048
2087-2105
2088-2106
2093-2111
2094-2112
2099-2117
2102-2120
2145-2163
2146-2164
2147-2165
2148-2166
2150-2168
2151-2169
2152-2170
2153-2171
2158-2176
2182-2200
2183-2201
2184-2202
2188-2206
2216-2234
2219-2237
2220-2238
2222-2240
2228-2246
2232-2250
2269-2287
2281-2299
2282-2300
2284-2302
2288-2306
2293-2311
2295-2313
2297-2315
2301-2319
2303-2321
2306-2324
2307-2325
2308-2326
2309-2327
2310-2328
2311-2329
2315-2333
2317-2335
2349-2367
2380-2398
2389-2407
2390-2408
2420-2438
2424-2442
2425-2443
2429-2447
2430-2448
2431-2449
2432-2450
2434-2452
2437-2455
2443-2461
2522-2540
2576-2594
2601-2619
2681-2699
2690-2708
2692-2710
2697-2715
2700-2718
2703-2721
2837-2855
2840-2858
2856-2874
2857-2875
2947-2965
```

[0386] While preferred embodiments of the present disclosure have been shown and described herein, it will be obvious to those skilled in the art that such embodiments are provided by way of example only. Numerous variations, changes, and substitutions will now occur to those skilled in the art without departing from the disclosure. It should be understood that various alternatives to the embodiments of the present disclosure may be employed in practicing the present disclosure. It is intended that the following claims define the scope of the present disclosure and that methods and structures within the scope of these claims and their equivalents be covered thereby.

The application's sequence listing, which the Patent Office published only in electronic form, follows.

SEQUENCE LISTING (2763 sequences)

SEQ ID NO: 1 - DNA, 19 bp, synthetic construct
  source 1..19: mol_type = other DNA
  misc_feature 1..3: note = RNA
  misc_feature 4: note = DNA
  misc_feature 5..8: note = RNA
  misc_feature 9: note = DNA
  misc_feature 10..12: note = RNA
  misc_feature 13: note = DNA
  misc_feature 14..16: note = RNA
  misc_feature 17: note = DNA
  misc_feature 18..19: note = RNA
aagtccaatacctcactcg

SEQ ID NO: 2 - DNA, 19 bp, synthetic construct
  source 1..19: mol_type = other DNA
  misc_feature 1: note = DNA
  misc_feature 2..4: note = RNA
  misc_feature 5..6: note = DNA
  misc_feature 7..10: note = RNA
  misc_feature 11: note = DNA
  misc_feature 12..13: note = RNA
  misc_feature 14: note = DNA
  misc_feature 15: note = RNA
  misc_feature 16: note = DNA
  misc_feature 17: note = RNA
  misc_feature 18: note = DNA
  misc_feature 19: note = RNA
tagcttaccatactatatc

SEQ ID NO: 3 - DNA, 19 bp, synthetic construct
  source 1..19: mol_type = other DNA
  misc_feature 1..2: note = RNA
  misc_feature 3..4: note = DNA
  misc_feature 5..8: note = RNA
  misc_feature 9: note = DNA
  misc_feature 10..11: note = RNA
  misc_feature 12: note = DNA
  misc_feature 13: note = RNA
  misc_feature 14: note = DNA
  misc_feature 15: note = RNA
  misc_feature 16: note = DNA
  misc_feature 17: note = RNA
  misc_feature 18..19: note = DNA
gcttaccatactatatctt

SEQ ID NO: 4 - DNA, 19 bp, synthetic construct
  source 1..19: mol_type = other DNA
  misc_feature 1..5: note = RNA
  misc_feature 6..7: note = DNA
  misc_feature 8..9: note = RNA
  misc_feature 10: note = DNA
  misc_feature 11..13: note = RNA
  misc_feature 14: note = DNA
  misc_feature 15..19: note = RNA
gacaattcgtgggtccgca

SEQ ID NO: 5 - DNA, 19 bp, synthetic construct
  source 1..19: mol_type = other DNA
  misc_feature 1..3: note = RNA
  misc_feature 4..6: note = DNA
  misc_feature 7: note = RNA
  misc_feature 8..9: note = DNA
  misc_feature 10..12: note = RNA
  misc_feature 13: note = DNA
  misc_feature 14..19: note = RNA
agatttcttaagtgacgcc

SEQ ID NO: 6 - DNA, 19 bp, synthetic construct
  source 1..19: mol_type = other DNA
  misc_feature 1: note = RNA
  misc_feature 2..3: note = DNA
  misc_feature 4..6: note = RNA
  misc_feature 7: note = DNA
  misc_feature 8..13: note = RNA
  misc_feature 14: note = DNA
  misc_feature 15..16: note = RNA
  misc_feature 17: note = DNA
  misc_feature 18: note = RNA
  misc_feature 19: note = DNA
cttaagtgacgcctcatct

SEQ ID NO: 7 - DNA, 19 bp, synthetic construct
  source 1..19: mol_type = other DNA
  misc_feature 1..4: note = RNA
  misc_feature 5: note = DNA
  misc_feature 6..10: note = RNA
  misc_feature 11..12: note = DNA
  misc_feature 13..14: note = RNA
  misc_feature 15: note = DNA
  misc_feature 16..19: note = RNA
cccgtaagacttcatacaa

SEQ ID NO: 8 - DNA, 19 bp, synthetic construct
  source 1..19: mol_type = other DNA
  misc_feature 1..3: note = RNA
  misc_feature 4: note = DNA
  misc_feature 5..8: note = RNA
  misc_feature 9: note = DNA
  misc_feature 10: note = RNA
  misc_feature 11: note = DNA
  misc_feature 12..19: note = RNA
cgctcagctataagaagag

SEQ ID NO: 9 - DNA, 19 bp, synthetic construct
  source 1..19: mol_type = other DNA
  misc_feature 1: note = RNA
  misc_feature 2: note = DNA
  misc_feature 3: note = RNA
  misc_feature 4: note = DNA
  misc_feature 5: note = RNA
  misc_feature 6: note = DNA
  misc_feature 7..8: note = RNA
  misc_feature 9: note = DNA
  misc_feature 10..11: note = RNA
  misc_feature 12: note = DNA
  misc_feature 13..14: note = RNA
  misc_feature 15: note = DNA
  misc_feature 16..17: note = RNA
  misc_feature 18..19: note = DNA
ctgtatcatcgtgatgctt

SEQ ID NO: 10 - DNA, 19 bp, synthetic construct
  source 1..19: mol_type = other DNA
  misc_feature 1: note = DNA
  misc_feature 2: note = RNA
  misc_feature 3: note = DNA
  misc_feature 4: note = RNA
  misc_feature 5: note = DNA
  misc_feature 6..7: note = RNA
  misc_feature 8: note = DNA
  misc_feature 9..10: note = RNA
  misc_feature 11: note = DNA
  misc_feature 12..13: note = RNA
  misc_feature 14: note = DNA
  misc_feature 15..16: note = RNA
  misc_feature 17..18: note = DNA
  misc_feature 19: note = RNA
tgtatcatcgtgatgcttc

SEQ ID NO: 11 - DNA, 19 bp, synthetic construct
  source 1..19: mol_type = other DNA
  misc_feature 1: note = RNA
  misc_feature 2: note = DNA
  misc_feature 3..4: note = RNA
  misc_feature 5: note = DNA
  misc_feature 6: note = RNA
  misc_feature 7: note = DNA
  misc_feature 8..10: note = RNA
  misc_feature 11: note = DNA
  misc_feature 12..13: note = RNA
  misc_feature 14: note = DNA
  misc_feature 15: note = RNA
  misc_feature 16: note = DNA
  misc_feature 17..18: note = RNA
  misc_feature 19: note = DNA
gtcatatcactaatatact

SEQ ID NO: 12 - DNA, 19 bp, synthetic construct
  source 1..19: mol_type = other DNA
  misc_feature 1..2: note = RNA
  misc_feature 3..4: note = DNA
  misc_feature 5..7: note = RNA
  misc_feature 8: note = DNA
  misc_feature 9..11: note = RNA
  misc_feature 12..13: note = DNA
  misc_feature 14..17: note = RNA
  misc_feature 18: note = DNA
  misc_feature 19: note = RNA
agttacctagcttaccata

SEQ ID NO: 13 - DNA, 19 bp, synthetic construct
  source 1..19: mol_type = other DNA
  misc_feature 1: note = DNA
  misc_feature 2: note = RNA
  misc_feature 3..4: note = DNA
  misc_feature 5..7: note = RNA
  misc_feature 8: note = DNA
  misc_feature 9..11: note = RNA
  misc_feature 12: note = DNA
  misc_feature 13..14: note = RNA
  misc_feature 15: note = DNA
  misc_feature 16..19: note = RNA
tcttaactacctaatagcc

SEQ ID NO: 14 - DNA, 19 bp, synthetic construct
  source 1..19: mol_type = other DNA
  misc_feature 1: note = RNA
  misc_feature 2..3: note = DNA
  misc_feature 4..6: note = RNA
  misc_feature 7: note = DNA
  misc_feature 8..10: note = RNA
  misc_feature 11: note = DNA
  misc_feature 12..13: note = RNA
  misc_feature 14: note = DNA
  misc_feature 15..18: note = RNA
  misc_feature 19: note = DNA
cttaactacctaatagcct

SEQ ID NO: 15 - DNA, 19 bp, synthetic construct
  source 1..19: mol_type = other DNA
  misc_feature 1: note = RNA
  misc_feature 2: note = DNA
  misc_feature 3: note = RNA
  misc_feature 4: note = DNA
  misc_feature 5: note = RNA
  misc_feature 6: note = DNA
  misc_feature 7..14: note = RNA
  misc_feature 15: note = DNA
  misc_feature 16..17: note = RNA
  misc_feature 18: note = DNA
  misc_feature 19: note = RNA
ctctatcaaccaaatggta

SEQ ID NO: 16 - DNA, 19 bp, synthetic construct
  source 1..19: mol_type = other DNA
  misc_feature 1..8: note = RNA
  misc_feature 9: note = DNA
  misc_feature 10..11: note = RNA
  misc_feature 12: note = DNA
  misc_feature 13..17: note = RNA
  misc_feature 18: note = DNA
  misc_feature 19: note = RNA
caaccaaatggtaagcatc

SEQ ID NO: 17 - DNA, 19 bp, synthetic construct
  source 1..19: mol_type = other DNA
  misc_feature 1: note = RNA
  misc_feature 2: note = DNA
  misc_feature 3: note = RNA
  misc_feature 4: note = DNA
  misc_feature 5..6: note = RNA
  misc_feature 7: note = DNA
  misc_feature 8..11: note = RNA
  misc_feature 12: note = DNA
  misc_feature 13..15: note = RNA
  misc_feature 16..17: note = DNA
  misc_feature 18: note = RNA
  misc_feature 19: note = DNA
ctctactgagctaaattat

SEQ ID NO: 18 - DNA, 19 bp, synthetic construct
  source 1..19: mol_type = other DNA
  misc_feature 1: note = DNA
  misc_feature 2: note = RNA
  misc_feature 3: note = DNA
  misc_feature 4..5: note = RNA
  misc_feature 6: note = DNA
  misc_feature 7..10: note = RNA
  misc_feature 11: note = DNA
  misc_feature 12..14: note = RNA
  misc_feature 15..16: note = DNA
  misc_feature 17: note = RNA
  misc_feature 18: note = DNA
  misc_feature 19: note = RNA
tctactgagctaaattata

SEQ ID NO: 19 - DNA, 19 bp, synthetic construct
  source 1..19: mol_type = other DNA
  misc_feature 1..2: note = RNA
  misc_feature 3: note = DNA
  misc_feature 4..6: note = RNA
  misc_feature 7..8: note = DNA
  misc_feature 9: note = RNA
  misc_feature 10: note = DNA
  misc_feature 11..13: note = RNA
  misc_feature 14: note = DNA
  misc_feature 15..19: note = RNA
gctaaattatagatccagc

SEQ ID NO: 20 - DNA, 19 bp, synthetic construct
  source 1..19: mol_type = other DNA
  misc_feature 1..7: note = RNA
  misc_feature 8: note = DNA
  misc_feature 9: note = RNA
  misc_feature 10..11: note = DNA
  misc_feature 12..13: note = RNA
  misc_feature 14: note = DNA
  misc_feature 15..17: note = RNA
  misc_feature 18: note = DNA
  misc_feature 19: note = RNA
acacaagtgttgctaactc

SEQ ID NO: 21 - DNA, 19 bp, synthetic construct
  source 1..19: mol_type = other DNA
  misc_feature 1: note = RNA
  misc_feature 2..3: note = DNA
  misc_feature 4..5: note = RNA
  misc_feature 6: note = DNA
  misc_feature 7..9: note = RNA
  misc_feature 10: note = DNA
  misc_feature 11..13: note = RNA
  misc_feature 14: note = DNA
  misc_feature 15..16: note = RNA
  misc_feature 17: note = DNA
  misc_feature 18..19: note = RNA
gttgctaactcaatagtga

SEQ ID NO: 22 - DNA, 19 bp, synthetic construct
  source 1..19: mol_type = other DNA
  misc_feature 1..2: note = RNA
  misc_feature 3..5: note = DNA
  misc_feature 6: note = RNA
  misc_feature 7..8: note = DNA
  misc_feature 9..11: note = RNA
  misc_feature 12: note = DNA
  misc_feature 13..18: note = RNA
  misc_feature 19: note = DNA
gatttcttaagtgacgcct

SEQ ID NO: 23 - DNA, 19 bp, synthetic construct
  source 1..19: mol_type = other DNA
  misc_feature 1: note = DNA
  misc_feature 2: note = RNA
  misc_feature 3..4: note = DNA
  misc_feature 5..7: note = RNA
  misc_feature 8: note = DNA
  misc_feature 9..14: note = RNA
  misc_feature 15: note = DNA
  misc_feature 16..17: note = RNA
  misc_feature 18: note = DNA
  misc_feature 19: note = RNA
tcttaagtgacgcctcatc

SEQ ID NO: 24 - DNA, 19 bp, synthetic construct
  source 1..19: mol_type = other DNA
  misc_feature 1..2: note = DNA
  misc_feature 3..5: note = RNA
  misc_feature 6: note = DNA
  misc_feature 7..12: note = RNA
  misc_feature 13: note = DNA
  misc_feature 14..15: note = RNA
  misc_feature 16: note = DNA
  misc_feature 17: note = RNA
  misc_feature 18: note = DNA
  misc_feature 19: note = RNA
ttaagtgacgcctcatcta

SEQ ID NO: 25 - DNA, 19 bp, synthetic construct
  source 1..19: mol_type = other DNA
  misc_feature 1: note = RNA
  misc_feature 2: note = DNA
  misc_feature 3: note = RNA
  misc_feature 4: note = DNA
  misc_feature 5..14: note = RNA
  misc_feature 15: note = DNA
  misc_feature 16..19: note = RNA
ctataagaagagcctcaac

SEQ ID NO: 26 - DNA, 19 bp, synthetic construct
  source 1..19: mol_type = other DNA
  misc_feature 1: note = DNA
  misc_feature 2: note = RNA
  misc_feature 3: note = DNA
  misc_feature 4..13: note = RNA
  misc_feature 14: note = DNA
  misc_feature 15..19: note = RNA
tataagaagagcctcaacc

SEQ ID NO: 27 - DNA, 19 bp, synthetic construct
  source 1..19: mol_type = other DNA
  misc_feature 1: note = RNA
  misc_feature 2: note = DNA
  misc_feature 3..12: note = RNA
  misc_feature 13: note = DNA
  misc_feature 14..19: note = RNA
ataagaagagcctcaacca

SEQ ID NO: 28 - DNA, 19 bp, synthetic construct
  source 1..19: mol_type = other DNA
  misc_feature 1..9: note = RNA
  misc_feature 10: note = DNA
  misc_feature 11..17: note = RNA
  misc_feature 18: note = DNA
  misc_feature 19: note = RNA
acaagcacgtcaaaagcta

SEQ ID NO: 29 - DNA, 19 bp, synthetic construct
  source 1..19: mol_type = other DNA
  misc_feature 1: note = RNA
  misc_feature 2: note = DNA
  misc_feature 3..8: note = RNA
  misc_feature 9: note = DNA
  misc_feature 10: note = RNA
  misc_feature 11: note = DNA
  misc_feature 12: note = RNA
  misc_feature 13..15: note = DNA
  misc_feature 16: note = RNA
  misc_feature 17: note = DNA
  misc_feature 18..19: note = RNA
ctacagaatctatttatca

SEQ ID NO: 30 - DNA, 19 bp, synthetic construct
  source 1..19: mol_type = other DNA
  misc_feature 1..5: note = RNA
  misc_feature 6: note = DNA
  misc_feature 7..10: note = RNA
  misc_feature 11: note = DNA
  misc_feature 12..19: note = RNA
aaaactgcactgccaacaa

SEQ ID NO: 31 - DNA, 19 bp, synthetic construct
  source 1..19: mol_type = other DNA
  misc_feature 1..4: note = RNA
  misc_feature 5: note = DNA
  misc_feature 6..9: note = RNA
  misc_feature 10: note = DNA
  misc_feature 11..19: note = RNA
aaactgcactgccaacaag

SEQ ID NO: 32 - DNA, 19 bp, synthetic construct
  source 1..19: mol_type = other DNA
  misc_feature 1: note = DNA
  misc_feature 2..6: note = RNA
  misc_feature 7: note = DNA
  misc_feature 8..11: note = RNA
  misc_feature 12: note = DNA
  misc_feature 13: note = RNA
  misc_feature 14: note = DNA
  misc_feature 15..19: note = RNA
tgagaatcaagtatggaaa

SEQ ID NO: 33 - DNA, 19 bp, synthetic construct
  source 1..19: mol_type = other DNA
  misc_feature 1..3: note = RNA
  misc_feature 4: note = DNA
  misc_feature 5..6: note = RNA
  misc_feature 7: note = DNA
  misc_feature 8..9: note = RNA
  misc_feature 10..11: note = DNA
  misc_feature 12..13: note = RNA
  misc_feature 14: note = DNA
  misc_feature 15: note = RNA
  misc_feature 16: note = DNA
  misc_feature 17: note = RNA
  misc_feature 18: note = DNA
  misc_feature 19: note = RNA
aactggtggttaatatgtg

SEQ ID NO: 34 - DNA, 19 bp, synthetic construct
  source 1..19: mol_type = other DNA
  misc_feature 1..2: note = RNA
  misc_feature 3: note = DNA
  misc_feature 4..5: note = RNA
  misc_feature 6: note = DNA
  misc_feature 7..8: note = RNA
  misc_feature 9..10: note = DNA
  misc_feature 11..12: note = RNA
  misc_feature 13: note = DNA
  misc_feature 14: note = RNA
  misc_feature 15: note = DNA
  misc_feature 16: note = RNA
  misc_feature 17: note = DNA
  misc_feature 18..19: note = RNA
actggtggttaatatgtga

SEQ ID NO: 35 - DNA, 19 bp, synthetic construct
  source 1..19: mol_type = other DNA
  misc_feature 1: note = RNA
  misc_feature 2..3: note = DNA
  misc_feature 4: note = RNA
  misc_feature 5: note = DNA
  misc_feature 6..9: note = RNA
  misc_feature 10: note = DNA
  misc_feature 11: note = RNA
  misc_feature 12: note = DNA
  misc_feature 13: note = RNA
  misc_feature 14..15: note = DNA
  misc_feature 16..17: note = RNA
  misc_feature 18: note = DNA
  misc_feature 19: note = RNA
attatacactatattccta

SEQ ID NO: 36 - DNA, 19 bp, synthetic construct
  source 1..19: mol_type = other DNA
  misc_feature 1: note = RNA
  misc_feature 2: note = DNA
  misc_feature 3..5: note = RNA
  misc_feature 6..7: note = DNA
  misc_feature 8..12: note = RNA
  misc_feature 13: note = DNA
  misc_feature 14..19: note = RNA
gtaaattaccaatacagaa

SEQ ID NO: 37 - DNA, 19 bp, synthetic construct
  source 1..19: mol_type = other DNA
  misc_feature 1..3: note = RNA
  misc_feature 4: note = DNA
  misc_feature 5..6: note = RNA
  misc_feature 7..8: note = DNA
  misc_feature 9..10: note = RNA
  misc_feature 11: note = DNA
  misc_feature 12..13: note = RNA
  misc_feature 14: note = DNA
  misc_feature 15: note = RNA
  misc_feature 16..17: note = DNA
  misc_feature 18..19: note = RNA
aactgattagtcatattcc

SEQ ID NO: 38 - DNA, 19 bp, synthetic construct
  source 1..19: mol_type = other DNA
  misc_feature 1..2: note = RNA
  misc_feature 3: note = DNA
  misc_feature 4: note = RNA
  misc_feature 5: note = DNA
  misc_feature 6..9: note = RNA
  misc_feature 10: note = DNA
  misc_feature 11..13: note = RNA
  misc_feature 14..15: note = DNA
  misc_feature 16: note = RNA
  misc_feature 17..18: note = DNA
  misc_feature 19: note = RNA
actatagaataagttctta

SEQ ID NO: 39 - DNA, 19 bp, synthetic construct
  source 1..19: mol_type = other DNA
  misc_feature 1..2: note = RNA
  misc_feature 3: note = DNA
  misc_feature 4: note = RNA
  misc_feature 5: note = DNA
  misc_feature 6..15: note = RNA
  misc_feature 16: note = DNA
  misc_feature 17..19: note = RNA
gctataagaagagcctcaa

SEQ ID NO: 40 - DNA, 19 bp, synthetic construct
  source 1..19: mol_type = other DNA
  misc_feature 1..5: note = RNA
  misc_feature 6: note = DNA
  misc_feature 7..11: note = RNA
  misc_feature 12..13: note = DNA
  misc_feature 14..18: note = RNA
  misc_feature 19: note = DNA
aaaggtcaagattaagact

SEQ ID NO: 41 - DNA, 19 bp, synthetic construct
  source 1..19: mol_type = other DNA
  misc_feature 1..4: note = RNA
  misc_feature 5: note = DNA
  misc_feature 6..10: note = RNA
  misc_feature 11..12: note = DNA
  misc_feature 13..17: note = RNA
  misc_feature 18: note = DNA
  misc_feature 19: note = RNA
aaggtcaagattaagacta

SEQ ID NO: 42 - DNA, 19 bp, synthetic construct
  source 1..19: mol_type = other DNA
  misc_feature 1..3: note = RNA
  misc_feature 4..5: note = DNA
  misc_feature 6..10: note = RNA
  misc_feature 11: note = DNA
  misc_feature 12..16: note = RNA
  misc_feature 17..18: note = DNA
  misc_feature 19: note = RNA
agattaagactaaaactta

SEQ ID NO: 43 - DNA, 19 bp, synthetic construct
  source 1..19: mol_type = other DNA
  misc_feature 1..5: note = RNA
  misc_feature 6: note = DNA
  misc_feature 7..10: note = RNA
  misc_feature 11: note = DNA
  misc_feature 12: note = RNA
  misc_feature 13: note = DNA
  misc_feature 14..15: note = RNA
  misc_feature 16..17: note = DNA
  misc_feature 18: note = RNA
  misc_feature 19: note = DNA
acaaatgaagtgtcattat

SEQ ID NO: 44 - DNA, 19 bp, synthetic construct
  source 1..19: mol_type = other DNA
  misc_feature 1: note = RNA
  misc_feature 2: note = DNA
  misc_feature 3..8: note = RNA
  misc_feature 9..11: note = DNA
  misc_feature 12: note = RNA
  misc_feature 13: note = DNA
  misc_feature 14: note = RNA
  misc_feature 15: note = DNA
  misc_feature 16..19: note = RNA
ctcacaaatttctatccca

SEQ ID NO: 45 - DNA, 19 bp, synthetic construct
  source 1..19: mol_type = other DNA
  misc_feature 1: note = DNA
  misc_feature 2..6: note = RNA
  misc_feature 7: note = DNA
  misc_feature 8..11: note = RNA
  misc_feature 12: note = DNA
  misc_feature 13..19: note = RNA
taaaactgcactgccaaca

SEQ ID NO: 46 - DNA, 19 bp, synthetic construct
  source 1..19: mol_type = other DNA
  misc_feature 1..3: note = RNA
  misc_feature 4: note = DNA
  misc_feature 5..8: note = RNA
  misc_feature 9: note = DNA
  misc_feature 10..18: note = RNA
  misc_feature 19: note = DNA
aactgcactgccaacaagt

SEQ ID NO: 47 - DNA, 19 bp, synthetic construct
  source 1..19: mol_type = other DNA
  misc_feature 1..3: note = RNA
  misc_feature 4: note = DNA
  misc_feature 5..10: note = RNA
  misc_feature 11: note = DNA
  misc_feature 12: note = RNA
  misc_feature 13: note = DNA
  misc_feature 14: note = RNA
  misc_feature 15..17: note = DNA
  misc_feature 18: note = RNA
  misc_feature 19: note = DNA
agctacagaatctatttat

SEQ ID NO: 48 - DNA, 19 bp, synthetic construct
  source 1..19: mol_type = other DNA
  misc_feature 1..2: note = RNA
  misc_feature 3: note = DNA
  misc_feature 4..9: note = RNA
  misc_feature 10: note = DNA
  misc_feature 11: note = RNA
  misc_feature 12: note = DNA
  misc_feature 13: note = RNA
  misc_feature 14..16: note = DNA
  misc_feature 17: note = RNA
  misc_feature 18: note = DNA
  misc_feature 19: note = RNA
gctacagaatctatttatc

SEQ ID NO: 49 - DNA, 19 bp, synthetic construct
  source 1..19: mol_type = other DNA
  misc_feature 1..5: note = RNA
  misc_feature 6..7: note = DNA
  misc_feature 8: note = RNA
  misc_feature 9..10: note = DNA
  misc_feature 11: note = RNA
  misc_feature 12..13: note = DNA
  misc_feature 14..17: note = RNA
  misc_feature 18: note = DNA
  misc_feature 19: note = RNA
aaaacttattgttaccata

SEQ ID NO: 50 - DNA, 19 bp, synthetic construct
  source 1..19: mol_type = other DNA
  misc_feature 1..4: note = RNA
  misc_feature 5: note = DNA
  misc_feature 6..7: note = RNA
  misc_feature 8: note = DNA
  misc_feature 9..10: note = RNA
  misc_feature 11..12: note = DNA
  misc_feature 13..14: note = RNA
  misc_feature 15: note = DNA
  misc_feature 16: note = RNA
  misc_feature 17: note = DNA
  misc_feature 18: note = RNA
  misc_feature 19: note = DNA
gaactggtggttaatatgt

SEQ ID NO: 51 - DNA, 19 bp, synthetic construct
  source 1..19: mol_type = other DNA
  misc_feature 1..3: note = RNA
  misc_feature 4: note = DNA
  misc_feature 5..6: note = RNA
  misc_feature 7: note = DNA
  misc_feature 8..9: note = RNA
  misc_feature 10..11: note = DNA
  misc_feature 12..13: note = RNA
  misc_feature 14: note = DNA
  misc_feature 15: note = RNA
  misc_feature 16: note = DNA
  misc_feature 17: note = RNA
  misc_feature 18: note = DNA
  misc_feature 19: note = RNA
aactggtggttaatatgtg

SEQ ID NO: 52 - DNA, 19 bp, synthetic construct
  source 1..19: mol_type = other DNA
  misc_feature 1..2: note = RNA
  misc_feature 3: note = DNA
  misc_feature 4..5: note = RNA
  misc_feature 6: note = DNA
  misc_feature 7..8: note = RNA
  misc_feature 9..10: note = DNA
  misc_feature 11..12: note = RNA
  misc_feature 13: note = DNA
  misc_feature 14: note = RNA
  misc_feature 15: note = DNA
  misc_feature 16: note = RNA
  misc_feature 17: note = DNA
  misc_feature 18..19: note = RNA
actggtggttaatatgtga

SEQ ID NO: 53 - DNA, 19 bp, synthetic construct
  source 1..19: mol_type = other DNA
  misc_feature 1: note = RNA
  misc_feature 2: note = DNA
  misc_feature 3..4: note = RNA
  misc_feature 5: note = DNA
  misc_feature 6..7: note = RNA
  misc_feature 8..9: note = DNA
  misc_feature 10..11: note = RNA
  misc_feature 12: note = DNA
  misc_feature 13: note = RNA
  misc_feature 14: note = DNA
  misc_feature 15: note = RNA
  misc_feature 16: note = DNA
  misc_feature 17..19: note = RNA
ctggtggttaatatgtgac

SEQ ID NO: 54 - DNA, 19 bp, synthetic construct
  source 1..19: mol_type = other DNA
  misc_feature 1: note = RNA
  misc_feature 2..3: note = DNA
  misc_feature 4..5: note = RNA
  misc_feature 6: note = DNA
  misc_feature 7..9: note = RNA
  misc_feature 10: note = DNA
  misc_feature 11..18: note = RNA
  misc_feature 19: note = DNA
attcgtgggtccgcaaaat

SEQ ID NO: 55 - DNA, 19 bp, synthetic construct
  source 1..19: mol_type = other DNA
  misc_feature 1: note = RNA
  misc_feature 2: note = DNA
  misc_feature 3: note = RNA
  misc_feature 4..5: note = DNA
  misc_feature 6..7: note = RNA
  misc_feature 8: note = DNA
  misc_feature 9..12: note = RNA
  misc_feature 13: note = DNA
  misc_feature 14..17: note = RNA
  misc_feature 18: note = DNA
  misc_feature 19: note = RNA
atattcctacaataaagta

SEQ ID NO: 56 - DNA, 19 bp, synthetic construct
  source 1..19: mol_type = other DNA
  misc_feature 1..2: note = RNA
  misc_feature 3: note = DNA
  misc_feature 4..7: note = RNA
  misc_feature 8: note = DNA
  misc_feature 9: note = RNA
  misc_feature 10: note = DNA
  misc_feature 11..13: note = RNA
  misc_feature 14: note = DNA
  misc_feature 15: note = RNA
  misc_feature 16..19: note = DNA
aataggatatagctatttt

SEQ ID NO: 57 - DNA, 19 bp, synthetic construct
  source 1..19: mol_type = other DNA
  misc_feature 1..2: note = RNA
  misc_feature 3: note = DNA
  misc_feature 4..7: note = RNA
  misc_feature 8: note = DNA
  misc_feature 9: note = RNA
  misc_feature 10: note = DNA
  misc_feature 11..12: note = RNA
  misc_feature 13: note = DNA
  misc_feature 14..17: note = RNA
  misc_feature 18: note = DNA
  misc_feature 19: note = RNA
agtccactctactgagcta

SEQ ID NO: 58 - DNA, 19 bp, synthetic construct
  source 1..19: mol_type = other DNA
  misc_feature 1: note = RNA
  misc_feature 2: note = DNA
  misc_feature 3..4: note = RNA
  misc_feature 5: note = DNA
  misc_feature 6..12: note = RNA
  misc_feature 13..16: note = DNA
  misc_feature 17..18: note = RNA
  misc_feature 19: note = DNA
ataatccaacaattttaat

SEQ ID NO: 59 - DNA, 19 bp, synthetic construct
  source 1..19: mol_type = other DNA
  misc_feature 1: note = RNA
  misc_feature 2: note = DNA
  misc_feature 3: note = RNA
  misc_feature 4: note = DNA
  misc_feature 5: note = RNA
  misc_feature 6: note = DNA
  misc_feature 7..10: note = RNA
  misc_feature 11: note = DNA
  misc_feature 12..14: note = RNA
  misc_feature 15: note = DNA
  misc_feature 16: note = RNA
  misc_feature 17..18: note = DNA
  misc_feature 19: note = RNA
atatgtaacatcaatattg

SEQ ID NO: 60 - DNA, 19 bp, synthetic construct
  source 1..19: mol_type = other DNA
  misc_feature 1: note = DNA
  misc_feature 2..8: note = RNA
  misc_feature 9: note = DNA
  misc_feature 10..15: note = RNA
  misc_feature 16: note = DNA
  misc_feature 17..18: note = RNA
  misc_feature 19: note = DNA
tgaacccatgagagatact

SEQ ID NO: 61 - DNA, 19 bp, synthetic construct
  source 1..19: mol_type = other DNA
  misc_feature 1: note = DNA
  misc_feature 2: note = RNA
  misc_feature 3..4: note = DNA
  misc_feature 5..6: note = RNA
  misc_feature 7..9: note = DNA
  misc_feature 10..18: note = RNA
  misc_feature 19: note = DNA
tcttaatttacagggcact

SEQ ID NO: 62 - DNA, 19 bp, synthetic construct
  source 1..19: mol_type = other DNA
  misc_feature 1: note = RNA
  misc_feature 2..3: note = DNA
  misc_feature 4..5: note = RNA
  misc_feature 6..8: note = DNA
  misc_feature 9..17: note = RNA
  misc_feature 18: note = DNA
  misc_feature 19: note = RNA
cttaatttacagggcacta

SEQ ID NO: 63 - DNA, 19 bp, synthetic construct
  source 1..19: mol_type = other DNA
  misc_feature 1..6: note = RNA
  misc_feature 7: note = DNA
  misc_feature 8: note = RNA
  misc_feature 9: note = DNA
  misc_feature 10: note = RNA
  misc_feature 11..13: note = DNA
  misc_feature 14: note = RNA
  misc_feature 15: note = DNA
  misc_feature 16..18: note = RNA
  misc_feature 19: note = DNA
acagaatctatttatcaat

SEQ ID NO: 64 - DNA, 19 bp, synthetic construct
  source 1..19: mol_type = other DNA
  misc_feature 1: note = DNA
  misc_feature 2..6: note = RNA
  misc_feature 7..8: note = DNA
  misc_feature 9..14: note = RNA
  misc_feature 15: note = DNA
  misc_feature 16..17: note = RNA
  misc_feature 18: note = DNA
  misc_feature 19: note = RNA
tgaggattacagaatacta

SEQ ID NO: 65 - DNA, 19 bp, synthetic construct
  source 1..19: mol_type = other DNA
  misc_feature 1..2: note = DNA
  misc_feature 3: note = RNA
  misc_feature 4..6: note = DNA
  misc_feature 7..8: note = RNA
  misc_feature 9: note = DNA
  misc_feature 10..11: note = RNA
  misc_feature 12: note = DNA
  misc_feature 13..15: note = RNA
  misc_feature 16: note = DNA
  misc_feature 17: note = RNA
  misc_feature 18..19: note = DNA
ttctttaatactaagtatt

SEQ ID NO: 66 - DNA, 19 bp, synthetic construct
  source 1..19: mol_type = other DNA
  misc_feature 1: note = DNA
  misc_feature 2: note = RNA
  misc_feature 3: note = DNA
  misc_feature 4..8: note = RNA
  misc_feature 9: note = DNA
  misc_feature 10: note = RNA
  misc_feature 11..12: note = DNA
  misc_feature 13..15: note = RNA
  misc_feature 16: note = DNA
  misc_feature 17..18: note = RNA
  misc_feature 19: note = DNA
tctccaaatattaactaat

SEQ ID NO: 67 - DNA, 19 bp, synthetic construct
  source 1..19: mol_type = other DNA
  misc_feature 1: note = DNA
  misc_feature 2..7: note = RNA
  misc_feature 8: note = DNA
  misc_feature 9: note = RNA
  misc_feature 10: note = DNA
  misc_feature 11: note = RNA
  misc_feature 12: note = DNA
  misc_feature 13..14: note = RNA
  misc_feature 15..16: note = DNA
  misc_feature 17..19: note = RNA
tagaggatgtgtaattaac

SEQ ID NO: 68 - DNA, 19 bp, synthetic construct
  source 1..19: mol_type = other DNA
  misc_feature 1..2: note = RNA
  misc_feature 3..5: note = DNA
  misc_feature 6..8: note = RNA
  misc_feature 9..10: note = DNA
  misc_feature 11..13: note = RNA
  misc_feature 14: note = DNA
  misc_feature 15..18: note = RNA
  misc_feature 19: note = DNA
aatttaagttgactaaagt

SEQ ID NO: 69 - DNA, 19 bp, synthetic construct
  source 1..19: mol_type = other DNA
  misc_feature 1: note = DNA
  misc_feature 2: note = RNA
  misc_feature 3: note = DNA
  misc_feature 4..8: note = RNA
  misc_feature 9..10: note = DNA
  misc_feature 11..16: note = RNA
  misc_feature 17: note = DNA
  misc_feature 18..19: note = RNA
tgtgaggattacagaatac

SEQ ID NO: 70 - DNA, 19 bp, synthetic construct
  source 1..19: mol_type = other DNA
  misc_feature 1..2: note = DNA
  misc_feature 3..4: note = RNA
  misc_feature 5: note = DNA
  misc_feature 6..14: note = RNA
  misc_feature 15: note = DNA
  misc_feature 16..17: note = RNA
  misc_feature 18: note = DNA
  misc_feature 19: note = RNA
ttcatacaacacaatactc

SEQ ID NO: 71 - DNA, 19 bp, synthetic construct
  source 1..19: mol_type = other DNA
  misc_feature 1: note = RNA
  misc_feature 2: note = DNA
  misc_feature 3..7: note = RNA
  misc_feature 8: note = DNA
  misc_feature 9: note = RNA
  misc_feature 10..11: note = DNA
  misc_feature 12..14: note = RNA
  misc_feature 15: note = DNA
  misc_feature 16..17: note = RNA
  misc_feature 18..19: note = DNA
ctccaaatattaactaatt

SEQ ID NO: 72 - DNA, 19 bp, synthetic construct
  source 1..19: mol_type = other DNA
  misc_feature 1..2: note = RNA
  misc_feature 3: note = DNA
  misc_feature 4: note = RNA
  misc_feature 5: note = DNA
  misc_feature 6..8: note = RNA
  misc_feature 9: note = DNA
  misc_feature 10..11: note = RNA
  misc_feature 12: note = DNA
  misc_feature 13: note = RNA
  misc_feature 14: note = DNA
  misc_feature 15..16: note = RNA
  misc_feature 17: note = DNA
  misc_feature 18..19: note = RNA
catatcactaatatactaa

SEQ ID NO: 73 - DNA, 19 bp, synthetic construct
  source 1..19: mol_type = other DNA
  misc_feature 1: note = RNA
  misc_feature 2..3: note = DNA
  misc_feature 4..5: note = RNA
  misc_feature 6: note = DNA
  misc_feature 7..8: note = RNA
  misc_feature 9: note = DNA
  misc_feature 10: note = RNA
  misc_feature 11: note = DNA
  misc_feature 12..14: note = RNA
  misc_feature 15: note = DNA
  misc_feature 16..17: note = RNA
  misc_feature 18: note = DNA
  misc_feature 19: note = RNA
attagtcatatcactaata

SEQ ID NO: 74 - DNA, 19 bp, synthetic construct
  source 1..19: mol_type = other DNA
  misc_feature 1..3: note = RNA
  misc_feature 4: note = DNA
  misc_feature 5: note = RNA
  misc_feature 6: note = DNA
  misc_feature 7: note = RNA
  misc_feature 8..10: note = DNA
  misc_feature 11: note = RNA
  misc_feature 12: note = DNA
  misc_feature 13..15: note = RNA
  misc_feature 16..18: note = DNA
  misc_feature 19: note = RNA
gaatctatttatcaatttc

SEQ ID NO: 75 - DNA, 19 bp, synthetic construct
  source 1..19: mol_type = other DNA
  misc_feature 1..2: note = RNA
  misc_feature 3..4: note = DNA
  misc_feature 5..9: note = RNA
  misc_feature 10: note = DNA
  misc_feature 11: note = RNA
  misc_feature 12: note = DNA
  misc_feature 13: note = RNA
  misc_feature 14..15: note = DNA
  misc_feature 16: note = RNA
  misc_feature 17: note = DNA
  misc_feature 18..19: note = RNA
aattaaccatatcttctaa

SEQ ID NO: 76 - DNA, 19 bp, synthetic construct
  source 1..19: mol_type = other DNA
  misc_feature 1: note = RNA
  misc_feature 2: note = DNA
  misc_feature 3..8: note = RNA
  misc_feature 9: note = DNA
  misc_feature 10: note = RNA
  misc_feature 11: note = DNA
  misc_feature 12: note = RNA
  misc_feature 13: note = DNA
  misc_feature 14..15: note = RNA
  misc_feature 16..17: note = DNA
  misc_feature 18..19: note = RNA
gtagaggatgtgtaattaa

SEQ ID NO: 77 - DNA, 19 bp, synthetic construct
  source 1..19: mol_type = other DNA
  misc_feature 1..6: note = RNA
  misc_feature 7: note = DNA
  misc_feature 8..11: note = RNA
  misc_feature 12: note = DNA
  misc_feature 13..15: note = RNA
  misc_feature 16: note = DNA
  misc_feature 17..19: note = RNA
agaaagtccaatacctcac

SEQ ID NO: 78 - DNA, 19 bp, synthetic construct
  source 1..19: mol_type = other DNA
  misc_feature 1..3: note = RNA
  misc_feature 4..6: note = DNA
  misc_feature 7..8: note = RNA
  misc_feature 9: note = DNA
  misc_feature 10..11: note = RNA
  misc_feature 12..14: note = DNA
  misc_feature 15..17: note = RNA
  misc_feature 18..19: note = DNA
aactttggtaatttaagtt

SEQ ID NO: 79 - DNA, 19 bp, synthetic construct
  source 1..19: mol_type = other DNA
  misc_feature 1: note = RNA
  misc_feature 2: note = DNA
  misc_feature 3: note = RNA
  misc_feature 4: note = DNA
  misc_feature 5..9: note = RNA
  misc_feature 10: note = DNA
  misc_feature 11: note = RNA
  misc_feature 12..13: note = DNA
  misc_feature 14..16: note = RNA
  misc_feature 17: note = DNA
  misc_feature 18..19: note = RNA
ctctccaaatattaactaa

SEQ ID NO: 80 - DNA, 19 bp, synthetic construct
  source 1..19: mol_type = other DNA
  misc_feature 1: note = RNA
  misc_feature 2: note = DNA
  misc_feature 3..6: note = RNA
  misc_feature 7: note = DNA
  misc_feature 8..10: note = RNA
  misc_feature 11..12: note = DNA
  misc_feature 13: note = RNA
  misc_feature 14..15: note = DNA
  misc_feature 16: note = RNA
  misc_feature 17: note = DNA
  misc_feature 18: note = RNA
  misc_feature 19: note = DNA
atagaataagttcttatct

SEQ ID NO: 81 - DNA, 19 bp, synthetic construct
  source 1..19: mol_type = other DNA
  misc_feature 1: note = DNA
  misc_feature 2: note = RNA
  misc_feature 3: note = DNA
  misc_feature 4..6: note = RNA
  misc_feature 7: note = DNA
  misc_feature 8..9: note = RNA
  misc_feature 10: note = DNA
  misc_feature 11: note = RNA
  misc_feature 12: note = DNA
  misc_feature 13..14: note = RNA
  misc_feature 15: note = DNA
  misc_feature 16..19: note = RNA
tatcactaatatactaaca

SEQ ID NO: 82 - DNA, 19 bp, synthetic construct
  source 1..19: mol_type = other DNA
  misc_feature 1..5: note = RNA
  misc_feature 6: note = DNA
  misc_feature 7: note = RNA
  misc_feature 8: note = DNA
  misc_feature 9: note = RNA
  misc_feature 10: note = DNA
  misc_feature 11..12: note = RNA
  misc_feature 13..14: note = DNA
  misc_feature 15..19: note = RNA
gaggatgtgtaattaacca

SEQ ID NO: 83 - DNA, 19 bp, synthetic construct
  source 1..19: mol_type = other DNA
  misc_feature 1..3: note = RNA
  misc_feature 4: note = DNA
  misc_feature 5..6: note = RNA
  misc_feature 7: note = DNA
  misc_feature 8: note = RNA
  misc_feature 9: note = DNA
  misc_feature 10..12: note = RNA
  misc_feature 13: note = DNA
  misc_feature 14..17: note = RNA
  misc_feature 18..19: note = DNA
gaatactataactcaaatt

SEQ ID NO: 84 - DNA, 19 bp, synthetic construct
  source 1..19: mol_type = other DNA
  misc_feature 1: note = RNA
  misc_feature 2: note = DNA
  misc_feature 3..4: note = RNA
  misc_feature 5: note = DNA
  misc_feature 6..11: note = RNA
  misc_feature 12: note = DNA
  misc_feature 13: note = RNA
  misc_feature 14: note = DNA
  misc_feature 15..17: note = RNA
  misc_feature 18: note = DNA
  misc_feature 19: note = RNA
ctgctacaacctctagatc

SEQ ID NO: 85 - DNA, 19 bp, synthetic construct
  source 1..19: mol_type = other DNA
  misc_feature 1: note = RNA
  misc_feature 2: note = DNA
  misc_feature 3: note = RNA
  misc_feature 4..6: note = DNA
  misc_feature 7: note = RNA
  misc_feature 8: note = DNA
  misc_feature 9..11: note = RNA
  misc_feature 12..14: note = DNA
  misc_feature 15: note = RNA
  misc_feature 16: note = DNA
  misc_feature 17: note = RNA
  misc_feature 18: note = DNA
  misc_feature 19: note = RNA
ctatttatcaatttctgtc

SEQ ID NO: 86 - DNA, 19 bp, synthetic construct
  source 1..19: mol_type = other DNA
  misc_feature 1..7: note = RNA
  misc_feature 8: note = DNA
  misc_feature 9: note = RNA
  misc_feature 10..11: note = DNA
  misc_feature 12..13: note = RNA
  misc_feature 14: note = DNA
  misc_feature 15..16: note = RNA
  misc_feature 17: note = DNA
  misc_feature 18: note = RNA
  misc_feature 19: note = DNA
gaagacatgttactaatat

SEQ ID NO: 87 - DNA, 19 bp, synthetic construct
  source 1..19: mol_type = other DNA
  misc_feature 1: note = DNA
  misc_feature 2: note = RNA
  misc_feature 3: note = DNA
  misc_feature 4: note = RNA
  misc_feature 5: note = DNA
  misc_feature 6..10: note = RNA
  misc_feature 11: note = DNA
  misc_feature 12: note = RNA
  misc_feature 13..14: note = DNA
  misc_feature 15..17: note = RNA
  misc_feature 18: note = DNA
  misc_feature 19: note = RNA
tctctccaaatattaacta

SEQ ID NO: 88 - DNA, 19 bp, synthetic construct
  source 1..19: mol_type = other DNA
  misc_feature 1: note = DNA
  misc_feature 2..3: note = RNA
  misc_feature 4: note = DNA
  misc_feature 5..10: note = RNA
  misc_feature 11: note = DNA
  misc_feature 12: note = RNA
  misc_feature 13: note = DNA
  misc_feature 14..16: note = RNA
  misc_feature 17: note = DNA
  misc_feature 18: note = RNA
  misc_feature 19: note = DNA
tgctacaacctctagatct

SEQ ID NO: 89 - DNA, 19 bp, synthetic construct
  source 1..19: mol_type = other DNA
  misc_feature 1..2: note = RNA
  misc_feature 3: note = DNA
  misc_feature 4..11: note = RNA
  misc_feature 12: note = DNA
  misc_feature 13..16: note = RNA
  misc_feature 17: note = DNA
  misc_feature 18..19: note = RNA
catggagaaagtccaatac

SEQ ID NO: 90 - DNA, 19 bp, synthetic construct
  source 1..19: mol_type = other DNA
  misc_feature 1..2: note = RNA
  misc_feature 3: note = DNA
  misc_feature 4: note = RNA
  misc_feature 5: note = DNA
  misc_feature 6..10: note = RNA
  misc_feature 11: note = DNA
  misc_feature 12: note = RNA
  misc_feature 13: note = DNA
  misc_feature 14..16: note = RNA
  misc_feature 17..18: note = DNA
  misc_feature 19: note = RNA
actatcagaatctacattc

SEQ ID NO: 91 - DNA, 19 bp, synthetic construct
  source 1..19: mol_type = other DNA
  misc_feature 1: note = DNA
  misc_feature 2..3: note = RNA
  misc_feature 4: note = DNA
  misc_feature 5..12: note = RNA
  misc_feature 13: note = DNA
  misc_feature 14..17: note = RNA
  misc_feature 18: note = DNA
  misc_feature 19: note = RNA
tcatggagaaagtccaata

SEQ ID NO: 92 - RNA, 19 nt, synthetic construct
  source 1..19: mol_type = other RNA
atacctcactcgctcagca

SEQ ID NO: 93 - RNA, 19 nt, synthetic construct
  source 1..19: mol_type = other RNA
tacctcactcgctcagcta

SEQ ID NO: 94 - RNA, 19 nt, synthetic construct
  source 1..19: mol_type = other RNA
acctcactcgctcagctaa

SEQ ID NO: 95 - RNA, 19 nt, synthetic construct
  source 1..19: mol_type = other RNA
tgaaatgcctcaacaagca

SEQ ID NO: 96 - RNA, 19 nt, synthetic construct
  source 1..19: mol_type = other RNA
gaaatgcctcaacaagcaa

SEQ ID NO: 97 - RNA, 19 nt, synthetic construct
  source 1..19: mol_type = other RNA
aaatgcctcaacaagcaca

SEQ ID NO: 98 - RNA, 19 nt, synthetic construct
  source 1..19: mol_type = other RNA
aatgcctcaacaagcacga

SEQ ID NO: 99 - RNA, 19 nt, synthetic construct
  source 1..19: mol_type = other RNA
atgcctcaacaagcacgta

SEQ ID NO: 100 - RNA, 19 nt, synthetic construct
  source 1..19: mol_type = other RNA
tgcctcaacaagcacgtca

SEQ ID NO: 101 - RNA, 19 nt, synthetic construct
  source 1..19: mol_type = other RNA
cctcaacatggctcacaaa

SEQ ID NO: 102 - RNA, 19 nt, synthetic construct
  source 1..19: mol_type = other RNA
ctcaacatggctcacaaaa

SEQ ID NO: 103 - RNA, 19 nt, synthetic construct
  source 1..19: mol_type = other RNA
tcaacatggctcacaaata

SEQ ID NO: 104 - RNA, 19 nt, synthetic construct
  source 1..19: mol_type = other RNA
caacatggctcacaaatta

SEQ ID NO: 105 - RNA, 19 nt, synthetic construct
  source 1..19: mol_type = other RNA
agtccaatacctcactcga

SEQ ID NO: 106 - RNA, 19 nt, synthetic construct
  source 1..19: mol_type = other RNA
gtccaatacctcactcgca

SEQ ID NO: 107 - RNA, 19 nt, synthetic construct
  source 1..19: mol_type = other RNA
ccaatacctcactcgctca

SEQ ID NO: 108 - RNA, 19 nt, synthetic construct
  source 1..19: mol_type = other RNA
caatacctcactcgctcaa

SEQ ID NO: 109 - RNA, 19 nt, synthetic construct
  source 1..19: mol_type = other RNA
cagctataagaagagccta

SEQ ID NO: 110 - RNA, 19 nt, synthetic construct
  source 1..19: mol_type = other RNA
aagaagagcctcaaccata

SEQ ID NO: 111 - RNA, 19 nt, synthetic construct
  source 1..19: mol_type = other RNA
tgtctcatcttaatatgta

SEQ ID NO: 112 - RNA, 19 nt, synthetic construct
  source 1..19: mol_type = other RNA
gtctcatcttaatatgtca

SEQ ID NO: 113 - RNA, 19 nt, synthetic construct
  source 1..19: mol_type = other RNA
tctcatcttaatatgtcta

SEQ ID NO: 114 - RNA, 19 nt, synthetic construct
  source 1..19: mol_type = other RNA
ctcatcttaatatgtctca

SEQ ID NO: 115 - RNA, 19 nt, synthetic construct
  source 1..19: mol_type = other RNA
atcttaatatgtctcttga

SEQ ID NO: 116 - RNA, 19 nt, synthetic construct
  source 1..19: mol_type = other RNA
tcttaatatgtctcttgca

SEQ ID NO: 117 - RNA, 19 nt, synthetic construct
  source 1..19: mol_type = other RNA
cttaatatgtctcttgcta

SEQ ID NO: 118 - RNA, 19 nt, synthetic construct
  source 1..19: mol_type = other RNA
ttaatatgtctcttgctga

SEQ ID NO: 119 - RNA, 19 nt, synthetic construct
  source 1..19: mol_type = other RNA
taatatgtctcttgctgaa

SEQ ID NO: 120 - RNA, 19 nt, synthetic construct
  source 1..19: mol_type = other RNA
aatatgtctcttgctgata

SEQ ID NO: 121 - RNA, 19 nt, synthetic construct
  source 1..19: mol_type = other RNA
atatgtctcttgctgatca

SEQ ID NO: 122 - RNA, 19 nt, synthetic construct
  source 1..19: mol_type = other RNA
atgtctcttgctgatctga

SEQ ID NO: 123 - RNA, 19 nt, synthetic construct
  source 1..19: mol_type = other RNA
tgtctcttgctgatctgta

SEQ ID NO: 124 - RNA, 19 nt, synthetic construct
  source 1..19: mol_type = other RNA
ttgctgatctgtatcatca

SEQ ID NO: 125 - RNA, 19 nt, synthetic construct
  source 1..19: mol_type = other RNA
tgctgatctgtatcatcga

SEQ ID NO: 126 - RNA, 19 nt, synthetic construct
  source 1..19: mol_type = other RNA
gctgatctgtatcatcgta

SEQ ID NO: 127 - RNA, 19 nt, synthetic construct
  source 1..19: mol_type = other RNA
ctgatctgtatcatcgtga

SEQ ID NO: 128 - RNA, 19 nt, synthetic construct
  source 1..19: mol_type = other RNA
tgatctgtatcatcgtgaa

SEQ ID NO: 129 - RNA, 19 nt, synthetic construct
  source 1..19: mol_type = other RNA
gatctgtatcatcgtgata

SEQ ID NO: 130 - RNA, 19 nt, synthetic construct
  source 1..19: mol_type = other RNA
atctgtatcatcgtgatga

SEQ ID NO: 131 - RNA, 19 nt, synthetic construct
  source 1..19: mol_type = other RNA
tctgtatcatcgtgatgca

SEQ ID NO: 132 - RNA, 19 nt, synthetic construct
  source 1..19: mol_type = other RNA
gtatcatcgtgatgcttca

SEQ ID NO: 133 - RNA, 19 nt, synthetic construct
  source 1..19: mol_type = other RNA
tcatcgtgatgcttctcta

SEQ ID NO: 134 - RNA, 19 nt, synthetic construct
  source 1..19: mol_type = other RNA
catcgtgatgcttctctga

SEQ ID NO: 135 - RNA, 19 nt, synthetic construct
  source 1..19: mol_type = other RNA
atcgtgatgcttctctgaa

SEQ ID NO: 136 - RNA, 19 nt, synthetic construct
  source 1..19: mol_type = other RNA
tcgtgatgcttctctgaaa

SEQ ID NO: 137 - RNA, 19 nt, synthetic construct
  source 1..19: mol_type = other RNA
cgtgatgcttctctgaaga

SEQ ID NO: 138 - RNA, 19 nt, synthetic construct
  source 1..19: mol_type = other RNA
tctgaagttctgctacaaa

SEQ ID NO: 139 - RNA, 19 nt, synthetic construct
  source 1..19: mol_type = other RNA
ctgaagttctgctacaaca

SEQ ID NO: 140 - RNA, 19 nt, synthetic construct
  source 1..19: mol_type = other RNA
tgaagttctgctacaacca

SEQ ID NO: 141 - RNA, 19 nt, synthetic construct
  source 1..19: mol_type = other RNA
ttctgctacaacctctaga

SEQ ID NO: 142 - RNA, 19 nt, synthetic construct
  source 1..19: mol_type = other RNA
gctacaacctctagatcta

SEQ ID NO: 143 - RNA, 19 nt, synthetic construct
  source 1..19: mol_type = other RNA
aaatctgtcatcccatgca

SEQ ID NO: 144 - RNA, 19 nt, synthetic construct
  source 1..19: mol_type = other RNA
aatctgtcatcccatgcaa

SEQ ID NO: 145 - RNA, 19 nt, synthetic construct
  source 1..19: mol_type = other RNA
cctgagtagaagagtttca

SEQ ID NO: 146 - RNA, 19 nt, synthetic construct
  source 1..19: mol_type = other RNA
ttgtgaaaaggtcaagata

SEQ ID NO: 147 - RNA, 19 nt, synthetic construct
  source 1..19: mol_type = other RNA
tgtgaaaaggtcaagatta

SEQ ID NO: 148 - RNA, 19 nt, synthetic construct
  source 1..19: mol_type = other RNA
aaaaggtcaagattaagaa

SEQ ID NO: 149 - RNA, 19 nt, synthetic construct
  source 1..19: mol_type = other RNA
aggtcaagattaagactaa

SEQ ID NO: 150 - RNA, 19 nt, synthetic construct
  source 1..19: mol_type = other RNA
gtcaagattaagactaaaa

SEQ ID NO: 151 - RNA, 19 nt, synthetic construct
  source 1..19: mol_type = other RNA
tcaagattaagactaaaaa

SEQ ID NO: 152 - RNA, 19 nt, synthetic construct
  source 1..19: mol_type = other RNA
caagattaagactaaaaca

SEQ ID NO: 153 - RNA, 19 nt, synthetic construct
  source 1..19: mol_type = other RNA
aagattaagactaaaacta

SEQ ID NO: 154 - RNA, 19 nt, synthetic construct
  source 1..19: mol_type = other RNA
caagttcacttcatatata

SEQ ID NO: 155 - RNA, 19 nt, synthetic construct
  source 1..19: mol_type = other RNA
aagttcacttcatatataa

SEQ ID NO: 156 - RNA, 19 nt, synthetic construct
  source 1..19: mol_type = other RNA
actcttttgaggtgaataa

SEQ ID NO: 157 - RNA, 19 nt, synthetic construct
  source 1..19: mol_type = other RNA
ctcttttgaggtgaatata

SEQ ID NO: 158 - RNA, 19 nt, synthetic construct
  source 1..19: mol_type = other RNA
tcttttgaggtgaatataa

SEQ ID NO: 159 - RNA, 19 nt, synthetic construct
  source 1..19: mol_type = other RNA
tcaccaagtatcaaagtaa

SEQ ID NO: 160 - RNA, 19 nt, synthetic construct
  source 1..19: mol_type = other RNA
accaagtatcaaagtaata

SEQ ID NO: 161 - RNA, 19 nt, synthetic construct
  source 1..19: mol_type = other RNA
ccaagtatcaaagtaataa

SEQ ID NO: 162 - RNA, 19 nt, synthetic construct
  source 1..19: mol_type = other RNA
caaatgaagtgtcattata

SEQ ID NO: 163 - RNA, 19 nt, synthetic construct
  source 1..19: mol_type = other RNA
aaatgaagtgtcattatta

SEQ ID NO: 164 - RNA, 19 nt, synthetic construct
  source 1..19: mol_type = other RNA
aatgaagtgtcattattca

SEQ ID NO: 165 - RNA, 19 nt, synthetic construct
  source 1..19: mol_type = other RNA
gcacgtcaaaagctacaga

SEQ ID NO: 166 - RNA, 19 nt, synthetic construct
  source 1..19: mol_type = other RNA
atctgttggatcttgtaaa

SEQ ID NO: 167 - RNA, 19 nt, synthetic construct
  source 1..19: mol_type = other RNA
tctgttggatcttgtaaaa

SEQ ID NO: 168 - RNA, 19 nt, synthetic construct
  source 1..19: mol_type = other RNA
ctgttggatcttgtaaaca

SEQ ID NO: 169 - RNA, 19 nt, synthetic construct
  source 1..19: mol_type = other RNA
tgttggatcttgtaaacaa

SEQ ID NO: 170 - RNA, 19 nt, synthetic construct
  source 1..19: mol_type = other RNA
gttggatcttgtaaacata

SEQ ID NO: 171 - RNA, 19 nt, synthetic construct
  source 1..19: mol_type = other RNA
caactgttgatttcctcaa

SEQ ID NO: 172 - RNA, 19 nt, synthetic construct
  source 1..19: mol_type = other RNA
aacatggctcacaaattta

SEQ ID NO: 173 - RNA, 19 nt, synthetic construct
  source 1..19: mol_type = other RNA
tcacaaatttctatcccaa

SEQ ID NO: 174 - RNA, 19 nt, synthetic construct
  source 1..19: mol_type = other RNA
aatttctatcccaaatcta

SEQ ID NO: 175 - RNA, 19 nt, synthetic construct
  source 1..19: mol_type = other RNA
atttctatcccaaatctta

SEQ ID NO: 176 - RNA, 19 nt, synthetic construct
  source 1..19: mol_type = other RNA
cttttgaggtgaatataaa

SEQ ID NO: 177 - RNA, 19 nt, synthetic construct
  source 1..19: mol_type = other RNA
tttcaggtcttcaccaaga

SEQ ID NO: 178 - RNA, 19 nt, synthetic construct
  source 1..19: mol_type = other RNA
ttcaggtcttcaccaagta

SEQ ID NO: 179 - RNA, 19 nt, synthetic construct
  source 1..19: mol_type = other RNA
tcaggtcttcaccaagtaa

SEQ ID NO: 180 - RNA, 19 nt, synthetic construct
  source 1..19: mol_type = other RNA
caggtcttcaccaagtata

SEQ ID NO: 181 - RNA, 19 nt, synthetic construct
  source 1..19: mol_type = other RNA
aggtcttcaccaagtatca

SEQ ID NO: 182 - RNA, 19 nt, synthetic construct
  source 1..19: mol_type = other RNA
atgaagtgtcattattcaa

SEQ ID NO: 183 - RNA, 19 nt, synthetic construct
  source 1..19: mol_type = other RNA
cactgactcctcacatcta

SEQ ID NO: 184 - RNA, 19 nt, synthetic construct
  source 1..19: mol_type = other RNA
tttctatgccacattaaca

SEQ ID NO: 185 - RNA, 19 nt, synthetic construct
  source 1..19: mol_type = other RNA
gacttcatacaacacaata

SEQ ID NO: 186 - RNA, 19 nt, synthetic construct
  source 1..19: mol_type = other RNA
catacaacacaatactcta

SEQ ID NO: 187 - RNA, 19 nt, synthetic construct
  source 1..19: mol_type = other RNA
atacaacacaatactctaa

SEQ ID NO: 188 - RNA, 19 nt, synthetic construct
  source 1..19: mol_type = other RNA
gaagacagttatctcataa

SEQ ID NO: 189 - RNA, 19 nt, synthetic construct
  source 1..19: mol_type = other RNA
aagacagttatctcatata

SEQ ID NO: 190 - RNA, 19 nt, synthetic construct
  source 1..19: mol_type = other RNA
acagttatctcatatttga

SEQ ID NO: 191 - RNA, 19 nt, synthetic construct
  source 1..19: mol_type = other RNA
agttatctcatatttggca

SEQ ID NO: 192 - RNA, 19 nt, synthetic construct
  source 1..19: mol_type = other RNA
atggagaaagtccaataca

SEQ ID NO: 193 - RNA, 19 nt, synthetic construct
  source 1..19: mol_type = other RNA
agaagagcctcaaccatta

SEQ ID NO: 194 - RNA, 19 nt, synthetic construct
  source 1..19: mol_type = other RNA
gaagagcctcaaccattga

SEQ ID NO: 195 - RNA, 19 nt, synthetic construct
  source 1..19: mol_type = other RNA
aagagcctcaaccattgaa

SEQ ID NO: 196 - RNA, 19 nt, synthetic construct
  source 1..19: mol_type = other RNA
agagcctcaaccattgaaa

SEQ ID NO: 197 - RNA, 19 nt, synthetic construct
  source 1..19: mol_type = other RNA
gcctcaaccattgaaatga

SEQ ID NO: 198 - RNA, 19 nt, synthetic construct
  source 1..19: mol_type = other RNA
tcaaccattgaaatgccta

SEQ ID NO: 199 - RNA, 19 nt, synthetic construct
  source 1..19: mol_type = other RNA
ccattgaaatgcctcaaca

SEQ ID NO: 200 - RNA, 19 nt, synthetic construct
  source 1..19: mol_type = other RNA
tttctgtctcatcttaata

SEQ ID NO: 201 - RNA, 19 nt, synthetic construct
  source 1..19: mol_type = other RNA
tcatcttaatatgtctcta

SEQ ID NO: 202 - RNA, 19 nt, synthetic construct
  source 1..19: mol_type = other RNA
catcttaatatgtctctta

SEQ ID NO: 203 - RNA, 19 nt, synthetic construct
  source 1..19: mol_type = other RNA
gtctcttgctgatctgtaa

SEQ ID NO: 204 - RNA, 19 nt, synthetic construct
  source 1..19: mol_type = other RNA
tctcttgctgatctgtata

SEQ ID NO: 205 - RNA, 19 nt, synthetic construct
  source 1..19: mol_type = other RNA
ctcttgctgatctgtatca

SEQ ID NO: 206 - RNA, 19 nt, synthetic construct
  source 1..19: mol_type = other RNA
tcttgctgatctgtatcaa

SEQ ID NO: 207 - RNA, 19 nt, synthetic construct
  source 1..19: mol_type = other RNA
cttgctgatctgtatcata

SEQ ID NO: 208 - RNA, 19 nt, synthetic construct
  source 1..19: mol_type = other RNA
gatgcttctctgaagttca

SEQ ID NO: 209 - RNA, 19 nt, synthetic construct
  source 1..19: mol_type = other RNA
atgcttctctgaagttcta

SEQ ID NO: 210 - RNA, 19 nt, synthetic construct
  source 1..19: mol_type = other RNA
tctctgaagttctgctaca

SEQ ID NO: 211 - RNA, 19 nt, synthetic construct
  source 1..19: mol_type = other RNA
gaagttctgctacaaccta

SEQ ID NO: 212 - RNA, 19 nt, synthetic construct
  source 1..19: mol_type = other RNA
tacaacctctagatctgca

SEQ ID NO: 213 - RNA, 19 nt, synthetic construct
  source 1..19: mol_type = other RNA
tctgtcatcccatgcagaa

SEQ ID NO: 214 - RNA, 19 nt, synthetic construct
  source 1..19: mol_type = other RNA
cacttcctgagtagaagaa

SEQ ID NO: 215 - RNA, 19 nt, synthetic construct
  source 1..19: mol_type = other RNA
tcctgagtagaagagttta

SEQ ID NO: 216 - RNA, 19 nt, synthetic construct
  source 1..19: mol_type = other RNA
ctgagtagaagagtttcta

SEQ ID NO: 217 - RNA, 19 nt, synthetic construct
  source 1..19: mol_type = other RNA
ggtcaagattaagactaaa

SEQ ID NO: 218 - RNA, 19 nt, synthetic construct
  source 1..19: mol_type = other RNA
ggatcttgtaaacatgaaa

SEQ ID NO: 219 - RNA, 19 nt, synthetic construct
  source 1..19: mol_type = other RNA
actgttgatttcctcaaca

SEQ ID NO: 220 - RNA, 19 nt, synthetic construct
  source 1..19: mol_type = other RNA
gttgatttcctcaacatga

SEQ ID NO: 221 - RNA, 19 nt, synthetic construct
  source 1..19: mol_type = other RNA
tgatttcctcaacatggca

SEQ ID NO: 222 - RNA, 19 nt, synthetic construct
  source 1..19: mol_type = other RNA
gatttcctcaacatggcta

SEQ ID NO: 223 - RNA, 19 nt, synthetic construct
  source 1..19: mol_type = other RNA
atttcctcaacatggctca

SEQ ID NO: 224 - RNA, 19 nt, synthetic construct
  source 1..19: mol_type = other RNA
ttcctcaacatggctcaca

SEQ ID NO: 225 - RNA, 19 nt, synthetic construct
  source 1..19: mol_type = other RNA
tcctcaacatggctcacaa

SEQ ID NO: 226 - RNA, 19 nt, synthetic construct
  source 1..19: mol_type = other RNA
ctgcactgccaacaagtta

SEQ ID NO: 227 - RNA, 19 nt, synthetic construct
  source 1..19: mol_type = other RNA
tgcactgccaacaagttca

SEQ ID NO: 228 - RNA, 19 nt, synthetic construct
  source 1..19: mol_type = other RNA
cactgccaacaagttcaca

SEQ ID NO: 229 - RNA, 19 nt, synthetic construct
  source 1..19: mol_type = other RNA
actgccaacaagttcacta

SEQ ID NO: 230 - RNA, 19 nt, synthetic construct
  source 1..19: mol_type = other RNA
ctgccaacaagttcactta

SEQ ID NO: 231 - RNA, 19 nt, synthetic construct
  source 1..19: mol_type = other RNA
ccaacaagttcacttcata

SEQ ID NO: 232 - RNA, 19 nt, synthetic construct
  source 1..19: mol_type = other RNA
caacaagttcacttcataa

SEQ ID NO: 233 - RNA, 19 nt, synthetic construct
  source 1..19: mol_type = other RNA
aacaagttcacttcatata

SEQ ID NO: 234 - RNA, 19 nt, synthetic construct
  source 1..19: mol_type = other RNA
acaagttcacttcatataa

SEQ ID NO: 235 - RNA, 19 nt, synthetic construct
  source 1..19: mol_type = other RNA
acttcatatataaagcata

SEQ ID NO: 236 - RNA, 19 nt, synthetic construct
  source 1..19: mol_type = other RNA
gtcttcaccaagtatcaaa

SEQ ID NO: 237 - RNA, 19 nt, synthetic construct
  source 1..19: mol_type = other RNA
tcttcaccaagtatcaaaa

SEQ ID NO: 238 - RNA, 19 nt, synthetic construct
  source 1..19: mol_type = other RNA
cttcaccaagtatcaaaga

SEQ ID NO: 239 - RNA, 19 nt, synthetic construct
  source 1..19: mol_type = other RNA
ttcaccaagtatcaaagta

SEQ ID NO: 240 - RNA, 19 nt, synthetic construct
  source 1..19: mol_type = other RNA
caccaagtatcaaagtaaa

SEQ ID NO: 241 - RNA, 19 nt, synthetic construct
  source 1..19: mol_type = other RNA
caagtatcaaagtaataaa

SEQ ID NO: 242 - RNA, 19 nt, synthetic construct
  source 1..19: mol_type = other RNA
aagtatcaaagtaataaca

SEQ ID NO: 243 - RNA, 19 nt, synthetic construct
  source 1..19: mol_type = other RNA
agtatcaaagtaataacaa

SEQ ID NO: 244 - RNA, 19 nt, synthetic construct
  source 1..19: mol_type = other RNA
aataacacaaatgaagtga

SEQ ID NO: 245 - RNA, 19 nt, synthetic construct
  source 1..19: mol_type = other RNA
ccactgactcctcacatca

SEQ ID NO: 246 - RNA, 19 nt, synthetic construct
  source 1..19: mol_type = other RNA
ctcacatctgttatcttaa

SEQ ID NO: 247 - RNA, 19 nt, synthetic construct
  source 1..19: mol_type = other RNA
tcacatctgttatcttata

SEQ ID NO: 248 - RNA, 19 nt, synthetic construct
  source 1..19: mol_type = other RNA
cacatctgttatcttatta

SEQ ID NO: 249 - RNA, 19 nt, synthetic construct
  source 1..19: mol_type = other RNA
agaactatttgtagtaaca

SEQ ID NO: 250 - RNA, 19 nt, synthetic construct
  source 1..19: mol_type = other RNA
gaactatttgtagtaacta

SEQ ID NO: 251 - RNA, 19 nt, synthetic construct
  source 1..19: mol_type = other RNA
ctatttgtagtaactatca

SEQ ID NO: 252 - RNA, 19 nt, synthetic construct
  source 1..19: mol_type = other RNA
tatttgtagtaactatcaa

SEQ ID NO: 253 - RNA, 19 nt, synthetic construct
  source 1..19: mol_type = other RNA
atttgtagtaactatcaga

SEQ ID NO: 254 - RNA, 19 nt, synthetic construct
  source 1..19: mol_type = other RNA
gtagtaactatcagaatca

SEQ ID NO: 255 - RNA, 19 nt, synthetic construct
  source 1..19: mol_type = other RNA
tagtaactatcagaatcta

SEQ ID NO: 256 - RNA, 19 nt, synthetic construct
  source 1..19: mol_type = other RNA
taactatcagaatctacaa

SEQ ID NO: 257 - RNA, 19 nt, synthetic construct
  source 1..19: mol_type = other RNA
ctatcagaatctacattca

SEQ ID NO: 258 - RNA, 19 nt, synthetic construct
  source 1..19: mol_type = other RNA
taaagttgatgagaatcaa

SEQ ID NO: 259 - RNA, 19 nt, synthetic construct
  source 1..19: mol_type = other RNA
aaagttgatgagaatcaaa

SEQ ID NO: 260 - RNA, 19 nt, synthetic construct
  source 1..19: mol_type = other RNA
aagttgatgagaatcaaga

SEQ ID NO: 261 - RNA, 19 nt, synthetic construct
  source 1..19: mol_type = other RNA
agttgatgagaatcaagta

SEQ ID NO: 262 - RNA, 19 nt, synthetic construct
  source 1..19: mol_type = other RNA
agtaaggccatactcttaa

SEQ ID NO: 263 - RNA, 19 nt, synthetic construct
  source 1..19: mol_type = other RNA
gtaaggccatactcttaca

SEQ ID NO: 264 - RNA, 19 nt, synthetic construct
  source 1..19: mol_type = other RNA
taaggccatactcttacaa

SEQ ID NO: 265 - RNA, 19 nt, synthetic construct
  source 1..19: mol_type = other RNA
ggccatactcttacataaa

SEQ ID NO: 266 - RNA, 19 nt, synthetic construct
  source 1..19: mol_type = other RNA
gccatactcttacataata

SEQ ID NO: 267 - RNA, 19 nt, synthetic construct
  source 1..19: mol_type = other RNA
aatctgttctaagacataa

SEQ ID NO: 268 - RNA, 19 nt, synthetic construct
  source 1..19: mol_type = other RNA
tctgttctaagacatatga

SEQ ID NO: 269 - RNA, 19 nt, synthetic construct
  source 1..19: mol_type = other RNA
gttctaagacatatgatca

SEQ ID NO: 270 - RNA, 19 nt, synthetic construct
  source 1..19: mol_type = other RNA
ttctaagacatatgatcaa

SEQ ID NO: 271 - RNA, 19 nt, synthetic construct
  source 1..19: mol_type = other RNA
tctaagacatatgatcaaa

SEQ ID NO: 272 - RNA, 19 nt, synthetic construct
  source 1..19: mol_type = other RNA
agacatatgatcaacagaa

SEQ ID NO: 273 - RNA, 19 nt, synthetic construct
  source 1..19: mol_type = other RNA
gacatatgatcaacagata

SEQ ID NO: 274 - RNA, 19 nt, synthetic construct
  source 1..19: mol_type = other RNA
acatatgatcaacagatga

SEQ ID NO: 275 - RNA, 19 nt, synthetic construct
  source 1..19: mol_type = other RNA
tatgatcaacagatgagaa

SEQ ID NO: 276 - RNA, 19 nt, synthetic construct
  source 1..19: mol_type = other RNA
atgatcaacagatgagaaa

SEQ ID NO: 277 - RNA, 19 nt, synthetic construct
  source 1..19: mol_type = other RNA
acagtgagattagtcataa

SEQ ID NO: 278 - RNA, 19 nt, synthetic construct
  source 1..19: mol_type = other RNA
cagtgagattagtcatata

SEQ ID NO: 279 - RNA, 19 nt, synthetic construct
  source 1..19: mol_type = other RNA
gtgagattagtcatatcaa

SEQ ID NO: 280 - RNA, 19 nt, synthetic construct
  source 1..19: mol_type = other RNA
tacctagcttaccatacta

SEQ ID NO: 281 - RNA, 19 nt, synthetic construct
  source 1..19: mol_type = other RNA
acctagcttaccatactaa

SEQ ID NO: 282 - RNA, 19 nt, synthetic construct
  source 1..19: mol_type = other RNA
cctagcttaccatactata

SEQ ID NO: 283 - RNA, 19 nt, synthetic construct
  source 1..19: mol_type = other RNA
ctagcttaccatactataa

SEQ ID NO: 284 - RNA, 19 nt, synthetic construct
  source 1..19: mol_type = other RNA
agcttaccatactatatca

SEQ ID NO: 285 - RNA, 19 nt, synthetic construct
  source 1..19: mol_type = other RNA
tctctctccaaatattaaa

SEQ ID NO: 286 - RNA, 19 nt, synthetic construct
  source 1..19: mol_type = other RNA
atgaacttgttggcccata

SEQ ID NO: 287 - RNA, 19 nt, synthetic construct
  source 1..19: mol_type = other RNA
tgaacttgttggcccatca

SEQ ID NO: 288 - RNA, 19 nt, synthetic construct
  source 1..19: mol_type = other RNA
gaacttgttggcccatcta

SEQ ID NO: 289 - RNA, 19 nt, synthetic construct
  source 1..19: mol_type = other RNA
aacttgttggcccatctaa

SEQ ID NO: 290 - RNA, 19 nt, synthetic construct
  source 1..19: mol_type = other RNA
cttgttggcccatctatta

SEQ ID NO: 291 - RNA, 19 nt, synthetic construct
  source 1..19: mol_type = other RNA
tgttggcccatctattaca

SEQ ID NO: 292 - RNA, 19 nt, synthetic construct
  source 1..19: mol_type = other RNA
atagatccagctatgctaa

SEQ ID NO: 293 - RNA, 19 nt, synthetic construct
  source 1..19: mol_type = other RNA
tagatccagctatgctata

SEQ ID NO: 294 - RNA, 19 nt, synthetic construct
  source 1..19: mol_type = other RNA
agatccagctatgctatta

SEQ ID NO: 295 - RNA, 19 nt, synthetic construct
  source 1..19: mol_type = other RNA
tcagaacatcttccaataa

SEQ ID NO: 296 - RNA, 19 nt, synthetic construct
  source 1..19: mol_type = other RNA
acatcttccaataactcaa

SEQ ID NO: 297 - RNA, 19 nt, synthetic construct
  source 1..19: mol_type = other RNA
tcaccaaactttggtaata

SEQ ID NO: 298 - RNA, 19 nt, synthetic construct
  source 1..19: mol_type = other RNA
caccaaactttggtaatta

SEQ ID NO: 299 - RNA, 19 nt, synthetic construct
  source 1..19: mol_type = other RNA
actttggtaatttaagtta

SEQ ID NO: 300 - RNA, 19 nt, synthetic construct
  source 1..19: mol_type = other RNA
ggtaatttaagttgactaa

SEQ ID NO: 301 - RNA, 19 nt, synthetic construct
  source 1..19: mol_type = other RNA
acacctatactgcataata

SEQ ID NO: 302 - RNA, 19 nt, synthetic construct
  source 1..19: mol_type = other RNA
cacctatactgcataatca

SEQ ID NO: 303 - RNA, 19 nt, synthetic construct
  source 1..19: mol_type = other RNA
acctatactgcataatcca

SEQ ID NO: 304 - RNA, 19 nt, synthetic construct
  source 1..19: mol_type = other RNA
cctatactgcataatccaa

SEQ ID NO: 305 - RNA, 19 nt, synthetic construct
  source 1..19: mol_type = other RNA
tatactgcataatccaaca

SEQ ID NO: 306 - RNA, 19 nt, synthetic construct
  source 1..19: mol_type = other RNA
atactgcataatccaacaa

SEQ ID NO: 307 - RNA, 19 nt, synthetic construct
  source 1..19: mol_type = other RNA
tactgcataatccaacaaa

SEQ ID NO: 308 - RNA, 19 nt, synthetic construct
  source 1..19: mol_type = other RNA
actgcataatccaacaata

SEQ ID NO: 309 - RNA, 19 nt, synthetic construct
  source 1..19: mol_type = other RNA
ttgaagacatgttactaaa

SEQ ID NO: 310 - RNA, 19 nt, synthetic construct
  source 1..19: mol_type = other RNA
tgaagacatgttactaata

SEQ ID NO: 311 - RNA, 19 nt, synthetic construct
  source 1..19: mol_type = other RNA
acatgttactaatataaca

SEQ ID NO: 312 - RNA, 19 nt, synthetic construct
  source 1..19: mol_type = other RNA
agagtagaggatgtgtaaa

SEQ ID NO: 313 - RNA, 19 nt, synthetic construct
  source 1..19: mol_type = other RNA
gtgtaattaaccatatcta

SEQ ID NO: 314 - RNA, 19 nt, synthetic construct
  source 1..19: mol_type = other RNA
aatattgaccttggtttca

SEQ ID NO: 315 - RNA, 19 nt, synthetic construct
  source 1..19: mol_type = other RNA
atattgaccttggtttcta

SEQ ID NO: 316 - RNA, 19 nt, synthetic construct
  source 1..19: mol_type = other RNA
attgaccttggtttcttaa

SEQ ID NO: 317 - RNA, 19 nt, synthetic construct
  source 1..19: mol_type = other RNA
accttggtttcttacacaa

SEQ ID NO: 318 - RNA, 19 nt, synthetic construct
  source 1..19: mol_type = other RNA
ggtttcttacacaagtgta

SEQ ID NO: 319 - RNA, 19 nt, synthetic construct
  source 1..19: mol_type = other RNA
tttcttacacaagtgttga

SEQ ID NO: 320 - RNA, 19 nt, synthetic construct
  source 1..19: mol_type = other RNA
tcttacacaagtgttgcta

SEQ ID NO: 321 - RNA, 19 nt, synthetic construct
  source 1..19: mol_type = other RNA
acaagtgttgctaactcaa

SEQ ID NO: 322 - RNA, 19 nt, synthetic construct
  source 1..19: mol_type = other RNA
agtgttgctaactcaataa

SEQ ID NO: 323 - RNA, 19 nt, synthetic construct
  source 1..19: mol_type = other RNA
gtgttgctaactcaataga

SEQ ID NO: 324 - RNA, 19 nt, synthetic construct
  source 1..19: mol_type = other RNA
tgttgctaactcaatagta

SEQ ID NO: 325 - RNA, 19 nt, synthetic construct
  source 1..19: mol_type = other RNA
ttgctaactcaatagtgaa

SEQ ID NO: 326 - RNA, 19 nt, synthetic construct
  source 1..19: mol_type = other RNA
tgctaactcaatagtgaaa

SEQ ID NO: 327 - RNA, 19 nt, synthetic construct
  source 1..19: mol_type = other RNA
aactcaatagtgaaggaga

SEQ ID NO: 328 - RNA, 19 nt, synthetic construct
  source 1..19: mol_type = other RNA
ctcaatagtgaaggagaca

SEQ ID NO: 329 - RNA, 19 nt, synthetic construct
  source 1..19: mol_type = other RNA
tggaaagtgtttggttcaa

SEQ ID NO: 330 - RNA, 19 nt, synthetic construct
  source 1..19: mol_type = other RNA
tttggttcagggatatcta

SEQ ID NO: 331 - RNA, 19 nt, synthetic construct
  source 1..19: mol_type = other RNA
ttggttcagggatatctga

SEQ ID NO: 332 - RNA, 19 nt, synthetic construct
  source 1..19: mol_type = other RNA
gcagagatttcttaagtga

SEQ ID NO: 333 - RNA, 19 nt, synthetic construct
  source 1..19: mol_type = other RNA
taagtgacgcctcatctaa

SEQ ID NO: 334 - RNA, 19 nt, synthetic construct
  source 1..19: mol_type = other RNA
agtgacgcctcatctacaa

SEQ ID NO: 335 - RNA, 19 nt, synthetic construct
  source 1..19: mol_type = other RNA
gacgcctcatctacaagca

SEQ ID NO: 336 - RNA, 19 nt, synthetic construct
  source 1..19: mol_type = other RNA
tcatctacaagctggaaaa

SEQ ID NO: 337 - RNA, 19 nt, synthetic construct
  source 1..19: mol_type = other RNA
tacactgtttgttacaata

SEQ ID NO: 338 - RNA, 19 nt, synthetic construct
  source 1..19: mol_type = other RNA
atcttattctgtgaggata

SEQ ID NO: 339 - RNA, 19 nt, synthetic construct
  source 1..19: mol_type = other RNA
attacagaatactataaca

SEQ ID NO: 340 - RNA, 19 nt, synthetic construct
  source 1..19: mol_type = other RNA
acagaatactataactcaa

SEQ ID NO: 341 - RNA, 19 nt, synthetic construct
  source 1..19: mol_type = other RNA
aaatcagaatcactatata

SEQ ID NO: 342 - RNA, 19 nt, synthetic construct
  source 1..19: mol_type = other RNA
agtcagaaaactccccaga

SEQ ID NO: 343 - RNA, 19 nt, synthetic construct
  source 1..19: mol_type = other RNA
gtcagaaaactccccagca

SEQ ID NO: 344 - RNA, 19 nt, synthetic construct
  source 1..19: mol_type = other RNA
tcagaaaactccccagcta

SEQ ID NO: 345 - RNA, 19 nt, synthetic construct
  source 1..19: mol_type = other RNA
cagaaaactccccagctaa

SEQ ID NO: 346 - RNA, 19 nt, synthetic construct
  source 1..19: mol_type = other RNA
agaaaactccccagctaaa

SEQ ID NO: 347 - RNA, 19 nt, synthetic construct
  source 1..19: mol_type = other RNA
gtaagacttcatacaacaa

SEQ ID NO: 348 - RNA, 19 nt, synthetic construct
  source 1..19: mol_type = other RNA
aagacttcatacaacacaa

SEQ ID NO: 349 - RNA, 19 nt, synthetic construct
  source 1..19: mol_type = other RNA
agacttcatacaacacaaa

SEQ ID NO: 350 - RNA, 19 nt, synthetic construct
  source 1..19: mol_type = other RNA
tgccaaggctacctaaaaa

SEQ ID NO: 351 - RNA, 19 nt, synthetic construct
  source 1..19: mol_type = other RNA
caaggctacctaaaagaaa

SEQ ID NO: 352 - RNA, 19 nt, synthetic construct
  source 1..19: mol_type = other RNA
aaggctacctaaaagaaga

SEQ ID NO: 353 - RNA, 19 nt, synthetic construct
  source 1..19: mol_type = other RNA
aggctacctaaaagaagaa

SEQ ID NO: 354 - RNA, 19 nt, synthetic construct
  source 1..19: mol_type = other RNA
ggctacctaaaagaagaca

SEQ ID NO: 355 - RNA, 19 nt, synthetic construct
  source 1..19: mol_type = other RNA
gctacctaaaagaagacaa

SEQ ID NO: 356 - RNA, 19 nt, synthetic construct
  source 1..19: mol_type = other RNA
ctacctaaaagaagacaga

SEQ ID NO: 357 - RNA, 19 nt, synthetic construct
  source 1..19: mol_type = other RNA
tacctaaaagaagacagta

SEQ ID NO: 358 - RNA, 19 nt, synthetic construct
  source 1..19: mol_type = other RNA
acctaaaagaagacagtta

SEQ ID NO: 359 - RNA, 19 nt, synthetic construct
  source 1..19: mol_type = other RNA
cctaaaagaagacagttaa

SEQ ID NO: 360 - RNA, 19 nt, synthetic construct
  source 1..19: mol_type = other RNA
ctaaaagaagacagttata

SEQ ID NO: 361 - RNA, 19 nt, synthetic construct
  source 1..19: mol_type = other RNA
taaaagaagacagttatca

SEQ ID NO: 362 - RNA, 19 nt, synthetic construct
  source 1..19: mol_type = other RNA
aaaagaagacagttatcta

SEQ ID NO: 363 - RNA, 19 nt, synthetic construct
  source 1..19: mol_type = other RNA
aaagaagacagttatctca

SEQ ID NO: 364 - RNA, 19 nt, synthetic construct
  source 1..19: mol_type = other RNA
aagaagacagttatctcaa

SEQ ID NO: 365 - RNA, 19 nt, synthetic construct
  source 1..19: mol_type = other RNA
agaagacagttatctcata

SEQ ID NO: 366 - RNA, 19 nt, synthetic construct
  source 1..19: mol_type = other RNA
agacagttatctcatatta

SEQ ID NO: 367 - RNA, 19 nt, synthetic construct
  source 1..19: mol_type = other RNA
gacagttatctcatattta

SEQ ID NO: 368 - RNA, 19 nt, synthetic construct
  source 1..19: mol_type = other RNA
cagttatctcatatttgga

SEQ ID NO: 369 - RNA, 19 nt, synthetic construct
  source 1..19: mol_type = other RNA
cttaaaacttcagacttca

SEQ ID NO: 370 - RNA, 19 nt, synthetic construct
  source 1..19: mol_type = other RNA
taaaacttcagacttccta

SEQ ID NO: 371 - RNA, 19 nt, synthetic construct
  source 1..19: mol_type = other RNA
gtcctgctggtatcatgga

SEQ ID NO: 372 - RNA, 19 nt, synthetic construct
  source 1..19: mol_type = other RNA
tcctgctggtatcatggaa

SEQ ID NO: 373 - RNA, 19 nt, synthetic construct
  source 1..19: mol_type = other RNA
cctgctggtatcatggaga

SEQ ID NO: 374 - RNA, 19 nt, synthetic construct
  source 1..19: mol_type = other RNA
ctgctggtatcatggagaa

SEQ ID NO: 375 - RNA, 19 nt, synthetic construct
  source 1..19: mol_type = other RNA
tgctggtatcatggagaaa

SEQ ID NO: 376 - RNA, 19 nt, synthetic construct
  source 1..19: mol_type = other RNA
gctggtatcatggagaaaa

SEQ ID NO: 377 - RNA, 19 nt, synthetic construct
  source 1..19: mol_type = other RNA
ctggtatcatggagaaaga

SEQ ID NO: 378 - RNA, 19 nt, synthetic construct
  source 1..19: mol_type = other RNA
tggtatcatggagaaagta

SEQ ID NO: 379 - RNA, 19 nt, synthetic construct
  source 1..19: mol_type = other RNA
ggtatcatggagaaagtca

SEQ ID NO: 380 - RNA, 19 nt, synthetic construct
  source 1..19: mol_type = other RNA
ggagaaagtccaataccta

SEQ ID NO: 381 - RNA, 19 nt, synthetic construct
  source 1..19: mol_type = other RNA
gagaaagtccaatacctca

SEQ ID NO: 382 - RNA, 19 nt, synthetic construct
  source 1..19: mol_type = other RNA
gaaagtccaatacctcaca

SEQ ID NO: 383 - RNA, 19 nt, synthetic construct
  source 1..19: mol_type = other RNA
aaagtccaatacctcacta

SEQ ID NO: 384 - RNA, 19 nt, synthetic construct
  source 1..19: mol_type = other RNA
tccaatacctcactcgcta

SEQ ID NO: 385 - RNA, 19 nt, synthetic construct
  source 1..19: mol_type = other RNA
cctcactcgctcagctata

SEQ ID NO: 386 - RNA, 19 nt, synthetic construct
  source 1..19: mol_type = other RNA
ctcactcgctcagctataa

SEQ ID NO: 387 - RNA, 19 nt, synthetic construct
  source 1..19: mol_type = other RNA
tcactcgctcagctataaa

SEQ ID NO: 388 - RNA, 19 nt, synthetic construct
  source 1..19: mol_type = other RNA
cactcgctcagctataaga

SEQ ID NO: 389 - RNA, 19 nt, synthetic construct
  source 1..19: mol_type = other RNA
ctcgctcagctataagaaa

SEQ ID NO: 390 - RNA, 19 nt, synthetic construct
  source 1..19: mol_type = other RNA
ctcagctataagaagagca

SEQ ID NO: 391 - RNA, 19 nt, synthetic construct
  source 1..19: mol_type = other RNA
tcagctataagaagagcca

SEQ ID NO: 392 - RNA, 19 nt, synthetic construct
  source 1..19: mol_type = other RNA
agctataagaagagcctca

SEQ ID NO: 393 - RNA, 19 nt, synthetic construct
  source 1..19: mol_type = other RNA
taagaagagcctcaaccaa

SEQ ID NO: 394 - RNA, 19 nt, synthetic construct
  source 1..19: mol_type = other RNA
gcctcaacaagcacgtcaa

SEQ ID NO: 395 - RNA, 19 nt, synthetic construct
  source 1..19: mol_type = other RNA
cctcaacaagcacgtcaaa

SEQ ID NO: 396 - RNA, 19 nt, synthetic construct
  source 1..19: mol_type = other RNA
ctcaacaagcacgtcaaaa

SEQ ID NO: 397 - RNA, 19 nt, synthetic construct
  source 1..19: mol_type = other RNA
tcaacaagcacgtcaaaaa

SEQ ID NO: 398 - RNA, 19 nt, synthetic construct
  source 1..19: mol_type = other RNA
tatcaatttctgtctcata

SEQ ID NO: 399 - RNA, 19 nt, synthetic construct
  source 1..19: mol_type = other RNA
atcaatttctgtctcatca

SEQ ID NO: 400 - RNA, 19 nt, synthetic construct
  source 1..19: mol_type = other RNA
tcaatttctgtctcatcta

SEQ ID NO: 401 - RNA, 19 nt, synthetic construct
  source 1..19: mol_type = other RNA
caatttctgtctcatctta

SEQ ID NO: 402 - RNA, 19 nt, synthetic construct
  source 1..19: mol_type = other RNA
ttctgtctcatcttaataa

SEQ ID NO: 403 - RNA, 19 nt, synthetic construct
  source 1..19: mol_type = other RNA
tctgtctcatcttaatata

SEQ ID NO: 404 - RNA, 19 nt, synthetic construct
  source 1..19: mol_type = other RNA
ctgtctcatcttaatatga

SEQ ID NO: 405 - RNA, 19 nt, synthetic construct
  source 1..19: mol_type = other RNA
tatgtctcttgctgatcta

SEQ ID NO: 406 - RNA, 19 nt, synthetic construct
  source 1..19: mol_type = other RNA
ttctctgaagttctgctaa

SEQ ID NO: 407 - RNA, 19 nt, synthetic construct
  source 1..19: mol_type = other RNA
ctctgaagttctgctacaa

SEQ ID NO: 408 - RNA, 19 nt, synthetic construct
  source 1..19: mol_type = other RNA
aagttctgctacaacctca

SEQ ID NO: 409 - RNA, 19 nt, synthetic construct
  source 1..19: mol_type = other RNA
agttctgctacaacctcta

SEQ ID NO: 410 - RNA, 19 nt, synthetic construct
  source 1..19: mol_type = other RNA
gttctgctacaacctctaa

SEQ ID NO: 411 - RNA, 19 nt, synthetic construct
  source 1..19: mol_type = other RNA
tctgctacaacctctagaa

SEQ ID NO: 412 - RNA, 19 nt, synthetic construct
  source 1..19: mol_type = other RNA
ctacaacctctagatctga

SEQ ID NO: 413 - RNA, 19 nt, synthetic construct
  source 1..19: mol_type = other RNA
acaacctctagatctgcaa

SEQ ID NO: 414 - RNA, 19 nt, synthetic construct
  source 1..19: mol_type = other RNA
gcttgccacatcagcttaa

SEQ ID NO: 415 - RNA, 19 nt, synthetic construct
  source 1..19: mol_type = other RNA
cttgccacatcagcttaaa

SEQ ID NO: 416 - RNA, 19 nt, synthetic construct
  source 1..19: mol_type = other RNA
ttgccacatcagcttaaaa

SEQ ID NO: 417 - RNA, 19 nt, synthetic construct
  source 1..19: mol_type = other RNA
cacatcagcttaaaatcta

SEQ ID NO: 418 - RNA, 19 nt, synthetic construct
  source 1..19: mol_type = other RNA
acatcagcttaaaatctga

SEQ ID NO: 419 - RNA, 19 nt, synthetic construct
  source 1..19: mol_type = other RNA
catcagcttaaaatctgta

SEQ ID NO: 420 - RNA, 19 nt, synthetic construct
  source 1..19: mol_type = other RNA
atcagcttaaaatctgtca

SEQ ID NO: 421 - RNA, 19 nt, synthetic construct
  source 1..19: mol_type = other RNA
tcagcttaaaatctgtcaa

SEQ ID NO: 422 - RNA, 19 nt, synthetic construct
  source 1..19: mol_type = other RNA
cagcttaaaatctgtcata

SEQ ID NO: 423 - RNA, 19 nt, synthetic construct
  source 1..19: mol_type = other RNA
agcttaaaatctgtcatca

SEQ ID NO: 424 - RNA, 19 nt, synthetic construct
  source 1..19: mol_type = other RNA
gcttaaaatctgtcatcca

SEQ ID NO: 425 - RNA, 19 nt, synthetic construct
  source 1..19: mol_type = other RNA
taacagaccacttcctgaa

SEQ ID NO: 426 - RNA, 19 nt, synthetic construct
  source 1..19: mol_type = other RNA
acagaccacttcctgagta

SEQ ID NO: 427 - RNA, 19 nt, synthetic construct
  source 1..19: mol_type = other RNA
cagaccacttcctgagtaa

SEQ ID NO: 428 - RNA, 19 nt, synthetic construct
  source 1..19: mol_type = other RNA
agaccacttcctgagtaga

SEQ ID NO: 429 - RNA, 19 nt, synthetic construct
  source 1..19: mol_type = other RNA
gaccacttcctgagtagaa

SEQ ID NO: 430 - RNA, 19 nt, synthetic construct
  source 1..19: mol_type = other RNA
ttcctgagtagaagagtta

SEQ ID NO: 431 - RNA, 19 nt, synthetic construct
  source 1..19: mol_type = other RNA
tttgtgaaaaggtcaagaa

SEQ ID NO: 432 - RNA, 19 nt, synthetic construct
  source 1..19: mol_type = other RNA
gtgaaaaggtcaagattaa

SEQ ID NO: 433 - RNA, 19 nt, synthetic construct
  source 1..19: mol_type = other RNA
tgaaaaggtcaagattaaa

SEQ ID NO: 434 - RNA, 19 nt, synthetic construct
  source 1..19: mol_type = other RNA
gaaaaggtcaagattaaga

SEQ ID NO: 435 - RNA, 19 nt, synthetic construct
  source 1..19: mol_type = other RNA
ttggatcttgtaaacatga

SEQ ID NO: 436 - RNA, 19 nt, synthetic construct
  source 1..19: mol_type = other RNA
tggatcttgtaaacatgaa

SEQ ID NO: 437 - RNA, 19 nt, synthetic construct
  source 1..19: mol_type = other RNA
tcttgtaaacatgaaaaga

SEQ ID NO: 438 - RNA, 19 nt, synthetic construct
  source 1..19: mol_type = other RNA
cttgtaaacatgaaaagga

SEQ ID NO: 439 - RNA, 19 nt, synthetic construct
  source 1..19: mol_type = other RNA
ttgtaaacatgaaaaggga

SEQ ID NO: 440 - RNA, 19 nt, synthetic construct
  source 1..19: mol_type = other RNA
aaacatgaaaagggcttta

SEQ ID NO: 441 - RNA, 19 nt, synthetic construct
  source 1..19: mol_type = other RNA
aacatgaaaagggctttaa

SEQ ID NO: 442 - RNA, 19 nt, synthetic construct
  source 1..19: mol_type = other RNA
ctatcccaaatcttttcta

SEQ ID NO: 443 - RNA, 19 nt, synthetic construct
  source 1..19: mol_type = other RNA
atcccaaatcttttctgaa

SEQ ID NO: 444 - RNA, 19 nt, synthetic construct
  source 1..19: mol_type = other RNA
tcccaaatcttttctgaaa

SEQ ID NO: 445 - RNA, 19 nt, synthetic construct
  source 1..19: mol_type = other RNA
cttttctgaagatgaagaa

SEQ ID NO: 446 - RNA, 19 nt, synthetic construct
  source 1..19: mol_type = other RNA
ttttctgaagatgaagaga

SEQ ID NO: 447 - RNA, 19 nt, synthetic construct
  source 1..19: mol_type = other RNA
tttctgaagatgaagagta

SEQ ID NO: 448 - RNA, 19 nt, synthetic construct
  source 1..19: mol_type = other RNA
ttctgaagatgaagagtta

SEQ ID NO: 449 - RNA, 19 nt, synthetic construct
  source 1..19: mol_type = other RNA
tctgaagatgaagagttta

SEQ ID NO: 450 - RNA, 19 nt, synthetic construct
  source 1..19: mol_type = other RNA
ctgaagatgaagagtttaa

SEQ ID NO: 451 - RNA, 19 nt, synthetic construct
  source 1..19: mol_type = other RNA
tgaagatgaagagtttaga

SEQ ID NO: 452 - RNA, 19 nt, synthetic construct
  source 1..19: mol_type = other RNA
gaagatgaagagtttagta

SEQ ID NO: 453 - RNA, 19 nt, synthetic construct
  source 1..19: mol_type = other RNA
actgcactgccaacaagta

SEQ ID NO: 454 - RNA, 19 nt, synthetic construct
  source 1..19: mol_type = other RNA
gcactgccaacaagttcaa

SEQ ID NO: 455 - RNA, 19 nt, synthetic construct
  source 1..19: mol_type = other RNA
tgccaacaagttcacttca

SEQ ID NO: 456 - RNA, 19 nt, synthetic construct
  source 1..19: mol_type = other RNA
ttcacttcatatataaaga

SEQ ID NO: 457 - RNA, 19 nt, synthetic construct
  source 1..19: mol_type = other RNA
tcacttcatatataaagca

SEQ ID NO: 458 - RNA, 19 nt, synthetic construct
  source 1..19: mol_type = other RNA
cacttcatatataaagcaa

SEQ ID NO: 459 - RNA, 19 nt, synthetic construct
  source 1..19: mol_type = other RNA
ttttactcttttgaggtga

SEQ ID NO: 460 - RNA, 19 nt, synthetic construct
  source 1..19: mol_type = other RNA
tttactcttttgaggtgaa

SEQ ID NO: 461 - RNA, 19 nt, synthetic construct
  source 1..19: mol_type = other RNA
ttactcttttgaggtgaaa

SEQ ID NO: 462 - RNA, 19 nt, synthetic construct
  source 1..19: mol_type = other RNA
tactcttttgaggtgaata

SEQ ID NO: 463 - RNA, 19 nt, synthetic construct
  source 1..19: mol_type = other RNA
ggtcttcaccaagtatcaa

SEQ ID NO: 464 - RNA, 19 nt, synthetic construct
  source 1..19: mol_type = other RNA
gtatcaaagtaataacaca

SEQ ID NO: 465 - RNA, 19 nt, synthetic construct
  source 1..19: mol_type = other RNA
caaagtaataacacaaata

SEQ ID NO: 466 - RNA, 19 nt, synthetic construct
  source 1..19: mol_type = other RNA
agtaataacacaaatgaaa

SEQ ID NO: 467 - RNA, 19 nt, synthetic construct
  source 1..19: mol_type = other RNA
tgactcctcacatctgtta

SEQ ID NO: 468 - RNA, 19 nt, synthetic construct
  source 1..19: mol_type = other RNA
actcctcacatctgttata

SEQ ID NO: 469 - RNA, 19 nt, synthetic construct
  source 1..19: mol_type = other RNA
ctcctcacatctgttatca

SEQ ID NO: 470 - RNA, 19 nt, synthetic construct
  source 1..19: mol_type = other RNA
tcctcacatctgttatcta

SEQ ID NO: 471 - RNA, 19 nt, synthetic construct
  source 1..19: mol_type = other RNA
tctatgccacattaacata

SEQ ID NO: 472 - RNA, 19 nt, synthetic construct
  source 1..19: mol_type = other RNA
ttaaagttgatgagaatca

SEQ ID NO: 473 - RNA, 19 nt, synthetic construct
  source 1..19: mol_type = other RNA
gatgagaatcaagtatgga

SEQ ID NO: 474 - RNA, 19 nt, synthetic construct
  source 1..19: mol_type = other RNA
atgagaatcaagtatggaa

SEQ ID NO: 475 - RNA, 19 nt, synthetic construct
  source 1..19: mol_type = other RNA
gagaatcaagtatggaaaa

SEQ ID NO: 476 - RNA, 19 nt, synthetic construct
  source 1..19: mol_type = other RNA
agaatcaagtatggaaaaa

SEQ ID NO: 477 - RNA, 19 nt, synthetic construct
  source 1..19: mol_type = other RNA
gaatcaagtatggaaaaga

SEQ ID NO: 478 - RNA, 19 nt, synthetic construct
  source 1..19: mol_type = other RNA
aatcaagtatggaaaagta

SEQ ID NO: 479 - RNA, 19 nt, synthetic construct
  source 1..19: mol_type = other RNA
atcaagtatggaaaagtaa

SEQ ID NO: 480 - RNA, 19 nt, synthetic construct
  source 1..19: mol_type = other RNA
tcaagtatggaaaagtaaa

SEQ ID NO: 481 - RNA, 19 nt, synthetic construct
  source 1..19: mol_type = other RNA
caagtatggaaaagtaaga

SEQ ID NO: 482 - RNA, 19 nt, synthetic construct
  source 1..19: mol_type = other RNA
aagtatggaaaagtaagga

SEQ ID NO: 483 - RNA, 19 nt, synthetic construct
  source 1..19: mol_type = other RNA
agtatggaaaagtaaggca

SEQ ID NO: 484 - RNA, 19 nt, synthetic construct
  source 1..19: mol_type = other RNA
gtatggaaaagtaaggcca

SEQ ID NO: 485 - RNA, 19 nt, synthetic construct
  source 1..19: mol_type = other RNA
tggaaaagtaaggccataa

SEQ ID NO: 486 - RNA, 19 nt, synthetic construct
  source 1..19: mol_type = other RNA
aaggccatactcttacata

SEQ ID NO: 487 - RNA, 19 nt, synthetic construct
  source 1..19: mol_type = other RNA
ccatactcttacataataa

SEQ ID NO: 488 - RNA, 19 nt, synthetic construct
  source 1..19: mol_type = other RNA
ttttcaaagaatcacagaa

SEQ ID NO: 489 - RNA, 19 nt, synthetic construct
  source 1..19: mol_type = other RNA
tttcaaagaatcacagaaa

SEQ ID NO: 490 - RNA, 19 nt, synthetic construct
  source 1..19: mol_type = other RNA
ttcaaagaatcacagaata

SEQ ID NO: 491 - RNA, 19 nt, synthetic construct
  source 1..19: mol_type = other RNA
aatcacagaattctagtaa

SEQ ID NO: 492 - RNA, 19 nt, synthetic construct
  source 1..19: mol_type = other RNA
atcacagaattctagtaca

SEQ ID NO: 493 - RNA, 19 nt, synthetic construct
  source 1..19: mol_type = other RNA
tcataaatctgttctaaga

SEQ ID NO: 494 - RNA, 19 nt, synthetic construct
  source 1..19: mol_type = other RNA
cataaatctgttctaagaa

SEQ ID NO: 495 - RNA, 19 nt, synthetic construct
  source 1..19: mol_type = other RNA
ataaatctgttctaagaca

SEQ ID NO: 496 - RNA, 19 nt, synthetic construct
  source 1..19: mol_type = other RNA
taaatctgttctaagacaa

SEQ ID NO: 497 - RNA, 19 nt, synthetic construct
  source 1..19: mol_type = other RNA
atctgttctaagacatata

SEQ ID NO: 498 - RNA, 19 nt, synthetic construct
  source 1..19: mol_type = other RNA
ctgttctaagacatatgaa

SEQ ID NO: 499 - RNA, 19 nt, synthetic construct
  source 1..19: mol_type = other RNA
tgttctaagacatatgata

SEQ ID NO: 500 - RNA, 19 nt, synthetic construct
  source 1..19: mol_type = other RNA
ctaagacatatgatcaaca

SEQ ID NO: 501 - RNA, 19 nt, synthetic construct
  source 1..19: mol_type = other RNA
taagacatatgatcaacaa

SEQ ID NO: 502 - RNA, 19 nt, synthetic construct
  source 1..19: mol_type = other RNA
catatgatcaacagatgaa

SEQ ID NO: 503 - RNA, 19 nt, synthetic construct
  source 1..19: mol_type = other RNA
atatgatcaacagatgaga

SEQ ID NO: 504 - RNA, 19 nt, synthetic construct
  source 1..19: mol_type = other RNA
tgatcaacagatgagaaca

SEQ ID NO: 505 - RNA, 19 nt, synthetic construct
  source 1..19: mol_type = other RNA
atcaacagatgagaactga

SEQ ID NO: 506 - RNA, 19 nt, synthetic construct
  source 1..19: mol_type = other RNA
tcaacagatgagaactgga

SEQ ID NO: 507 - RNA, 19 nt, synthetic construct
  source 1..19: mol_type = other RNA
agtgagattagtcatatca

SEQ ID NO: 508 - RNA, 19 nt, synthetic construct
  source 1..19: mol_type = other RNA
tgagattagtcatatcaca

SEQ ID NO: 509 - RNA, 19 nt, synthetic construct
  source 1..19: mol_type = other RNA
tcactaatatactaacaaa

SEQ ID NO: 510 - RNA, 19 nt, synthetic construct
  source 1..19: mol_type = other RNA
actgtagtgaattatctga

SEQ ID NO: 511 - RNA, 19 nt, synthetic construct
  source 1..19: mol_type = other RNA
ctgtagtgaattatctgaa

SEQ ID NO: 512 - RNA, 19 nt, synthetic construct
  source 1..19: mol_type = other RNA
ggaatcatgaaaccttaaa

SEQ ID NO: 513 - RNA, 19 nt, synthetic construct
  source 1..19: mol_type = other RNA
gaatcatgaaaccttaaga

SEQ ID NO: 514 - RNA, 19 nt, synthetic construct
  source 1..19: mol_type = other RNA
aatcatgaaaccttaagaa

SEQ ID NO: 515 - RNA, 19 nt, synthetic construct
  source 1..19: mol_type = other RNA
atcatgaaaccttaagaca

SEQ ID NO: 516 - RNA, 19 nt, synthetic construct
  source 1..19: mol_type = other RNA
tcatgaaaccttaagacta

SEQ ID NO: 517 - RNA, 19 nt, synthetic construct
  source 1..19: mol_type = other RNA
catgaaaccttaagactta

SEQ ID NO: 518 - RNA, 19 nt, synthetic construct
  source 1..19: mol_type = other RNA
gaaaccttaagacttcaga

SEQ ID NO: 519 - RNA, 19 nt, synthetic construct
  source 1..19: mol_type = other RNA
aaaccttaagacttcagaa

SEQ ID NO: 520 - RNA, 19 nt, synthetic construct
  source 1..19: mol_type = other RNA
gcaggttgtcttccattca

SEQ ID NO: 521 - RNA, 19 nt, synthetic construct
  source 1..19: mol_type = other RNA
caggttgtcttccattcca

SEQ ID NO: 522 - RNA, 19 nt, synthetic construct
  source 1..19: mol_type = other RNA
aggttgtcttccattccaa

SEQ ID NO: 523 - RNA, 19 nt, synthetic construct
  source 1..19: mol_type = other RNA
gcctaacatccaatgcaga

SEQ ID NO: 524 - RNA, 19 nt, synthetic construct
  source 1..19: mol_type = other RNA
cctaacatccaatgcagga

SEQ ID NO: 525 - RNA, 19 nt, synthetic construct
  source 1..19: mol_type = other RNA
ctaacatccaatgcaggca

SEQ ID NO: 526 - RNA, 19 nt, synthetic construct
  source 1..19: mol_type = other RNA
taacatccaatgcaggcaa

SEQ ID NO: 527 - RNA, 19 nt, synthetic construct
  source 1..19: mol_type = other RNA
aacatccaatgcaggcaaa

SEQ ID NO: 528 - RNA, 19 nt, synthetic construct
  source 1..19: mol_type = other RNA
acatccaatgcaggcaaga

SEQ ID NO: 529 - RNA, 19 nt, synthetic construct
  source 1..19: mol_type = other RNA
catccaatgcaggcaagga

SEQ ID NO: 530 - RNA, 19 nt, synthetic construct
  source 1..19: mol_type = other RNA
atccaatgcaggcaaggaa

SEQ ID NO: 531 - RNA, 19 nt, synthetic construct
  source 1..19: mol_type = other RNA
tccaatgcaggcaaggaaa

SEQ ID NO: 532 - RNA, 19 nt, synthetic construct
  source 1..19: mol_type = other RNA
ccaatgcaggcaaggaaaa

SEQ ID NO: 533 - RNA, 19 nt, synthetic construct
  source 1..19: mol_type = other RNA
caatgcaggcaaggaaaaa

SEQ ID NO: 534 - RNA, 19 nt, synthetic construct
  source 1..19: mol_type = other RNA
aatgcaggcaaggaaaata

SEQ ID NO: 535 - RNA, 19 nt, synthetic construct
  source 1..19: mol_type = other RNA
gcaaggaaaataaaagata

SEQ ID NO: 536 - RNA, 19 nt, synthetic construct
  source 1..19: mol_type = other RNA
aataaaagatttccagtga

SEQ ID NO: 537 - RNA, 19 nt, synthetic construct
  source 1..19: mol_type = other RNA
ataaaagatttccagtgaa

SEQ ID NO: 538 - RNA, 19 nt, synthetic construct
  source 1..19: mol_type = other RNA
taaaagatttccagtgaca

SEQ ID NO: 539 - RNA, 19 nt, synthetic construct
  source 1..19: mol_type = other RNA
aaaagatttccagtgacaa

SEQ ID NO: 540 - RNA, 19 nt, synthetic construct
  source 1..19: mol_type = other RNA
tatatgaattctctctcca

SEQ ID NO: 541 - RNA, 19 nt, synthetic construct
  source 1..19: mol_type = other RNA
atatgaattctctctccaa

SEQ ID NO: 542 - RNA, 19 nt, synthetic construct
  source 1..19: mol_type = other RNA
tatgaattctctctccaaa

SEQ ID NO: 543 - RNA, 19 nt, synthetic construct
  source 1..19: mol_type = other RNA
atgaattctctctccaaaa

SEQ ID NO: 544 - RNA, 19 nt, synthetic construct
  source 1..19: mol_type = other RNA
tgaattctctctccaaata

SEQ ID NO: 545 - RNA, 19 nt, synthetic construct
  source 1..19: mol_type = other RNA
gaattctctctccaaataa

SEQ ID NO: 546 - RNA, 19 nt, synthetic construct
  source 1..19: mol_type = other RNA
aattctctctccaaatata

SEQ ID NO: 547 - RNA, 19 nt, synthetic construct
  source 1..19: mol_type = other RNA
attctctctccaaatatta

SEQ ID NO: 548 - RNA, 19 nt, synthetic construct
  source 1..19: mol_type = other RNA
ttgaaatgaacttgttgga

SEQ ID NO: 549 - RNA, 19 nt, synthetic construct
  source 1..19: mol_type = other RNA
gaaatgaacttgttggcca

SEQ ID NO: 550 - RNA, 19 nt, synthetic construct
  source 1..19: mol_type = other RNA
aaatgaacttgttggccca

SEQ ID NO: 551 - RNA, 19 nt, synthetic construct
  source 1..19: mol_type = other RNA
aatgaacttgttggcccaa

SEQ ID NO: 552 - RNA, 19 nt, synthetic construct
  source 1..19: mol_type = other RNA
acttgttggcccatctata

SEQ ID NO: 553 - RNA, 19 nt, synthetic construct
  source 1..19: mol_type = other RNA
ttgttggcccatctattaa

SEQ ID NO: 554 - RNA, 19 nt, synthetic construct
  source 1..19: mol_type = other RNA
ttggcccatctattacata

SEQ ID NO: 555 - RNA, 19 nt, synthetic construct
  source 1..19: mol_type = other RNA
cccatctattacatctaca

SEQ ID NO: 556 - RNA, 19 nt, synthetic construct
  source 1..19: mol_type = other RNA
ccatctattacatctacaa

SEQ ID NO: 557 - RNA, 19 nt, synthetic construct
  source 1..19: mol_type = other RNA
catctattacatctacaga

SEQ ID NO: 558 - RNA, 19 nt, synthetic construct
  source 1..19: mol_type = other RNA
atctattacatctacagca

SEQ ID NO: 559 - RNA, 19 nt, synthetic construct
  source 1..19: mol_type = other RNA
tctattacatctacagcta

SEQ ID NO: 560 - RNA, 19 nt, synthetic construct
  source 1..19: mol_type = other RNA
ctattacatctacagctga

SEQ ID NO: 561 - RNA, 19 nt, synthetic construct
  source 1..19: mol_type = other RNA
tattacatctacagctgaa

SEQ ID NO: 562 - RNA, 19 nt, synthetic construct
  source 1..19: mol_type = other RNA
attacatctacagctgaca

SEQ ID NO: 563 - RNA, 19 nt, synthetic construct
  source 1..19: mol_type = other RNA
ttacatctacagctgacca

SEQ ID NO: 564 - RNA, 19 nt, synthetic construct
  source 1..19: mol_type = other RNA
tacatctacagctgaccca

SEQ ID NO: 565 - RNA, 19 nt, synthetic construct
  source 1..19: mol_type = other RNA
acatctacagctgacccta

SEQ ID NO: 566 - RNA, 19 nt, synthetic construct
  source 1..19: mol_type = other RNA
catctacagctgaccctta

SEQ ID NO: 567 - RNA, 19 nt, synthetic construct
  source 1..19: mol_type = other RNA
atctacagctgacccttga

SEQ ID NO: 568 - RNA, 19 nt, synthetic construct
  source 1..19: mol_type = other RNA
ggggttaggggagctgaca

SEQ ID NO: 569 - RNA, 19 nt, synthetic construct
  source 1..19: mol_type = other RNA
gggttaggggagctgacaa

SEQ ID NO: 570 - RNA, 19 nt, synthetic construct
  source 1..19: mol_type = other RNA
ggttaggggagctgacaaa

SEQ ID NO: 571 - RNA, 19 nt, synthetic construct
  source 1..19: mol_type = other RNA
gttaggggagctgacaata

SEQ ID NO: 572 - RNA, 19 nt, synthetic construct
  source 1..19: mol_type = other RNA
caaaatcttaactacctaa

SEQ ID NO: 573 - RNA, 19 nt, synthetic construct
  source 1..19: mol_type = other RNA
aatcttaactacctaataa

SEQ ID NO: 574 - RNA, 19 nt, synthetic construct
  source 1..19: mol_type = other RNA
atcttaactacctaataga

SEQ ID NO: 575 - RNA, 19 nt, synthetic construct
  source 1..19: mol_type = other RNA
ttaactacctaatagccta

SEQ ID NO: 576 - RNA, 19 nt, synthetic construct
  source 1..19: mol_type = other RNA
taactacctaatagcctaa

SEQ ID NO: 577 - RNA, 19 nt, synthetic construct
  source 1..19: mol_type = other RNA
actacctaatagcctacta

SEQ ID NO: 578 - RNA, 19 nt, synthetic construct
  source 1..19: mol_type = other RNA
attgaccataaaccttaca

SEQ ID NO: 579 - RNA, 19 nt, synthetic construct
  source 1..19: mol_type = other RNA
ttgaccataaaccttacta

SEQ ID NO: 580 - RNA, 19 nt, synthetic construct
  source 1..19: mol_type = other RNA
tgaccataaaccttactga

SEQ ID NO: 581 - RNA, 19 nt, synthetic construct
  source 1..19: mol_type = other RNA
gaccataaaccttactgaa

SEQ ID NO: 582 - RNA, 19 nt, synthetic construct
  source 1..19: mol_type = other RNA
accataaaccttactgata

SEQ ID NO: 583 - RNA, 19 nt, synthetic construct
  source 1..19: mol_type = other RNA
ccataaaccttactgataa

SEQ ID NO: 584 - RNA, 19 nt, synthetic construct
  source 1..19: mol_type = other RNA
cataaaccttactgataaa

SEQ ID NO: 585 - RNA, 19 nt, synthetic construct
  source 1..19: mol_type = other RNA
ataaaccttactgataaca

SEQ ID NO: 586 - RNA, 19 nt, synthetic construct
  source 1..19: mol_type = other RNA
ctgataacataaacagtaa

SEQ ID NO: 587 - RNA, 19 nt, synthetic construct
  source 1..19: mol_type = other RNA
tcattaaatggaagtggga

SEQ ID NO: 588 - RNA, 19 nt, synthetic construct
  source 1..19: mol_type = other RNA
cattaaatggaagtgggta

SEQ ID NO: 589 - RNA, 19 nt, synthetic construct
  source 1..19: mol_type = other RNA
ttcattctcattgtcttca

SEQ ID NO: 590 - RNA, 19 nt, synthetic construct
  source 1..19: mol_type = other RNA
tcattctcattgtcttcaa

SEQ ID NO: 591 - RNA, 19 nt, synthetic construct
  source 1..19: mol_type = other RNA
cattctcattgtcttcaca

SEQ ID NO: 592 - RNA, 19 nt, synthetic construct
  source 1..19: mol_type = other RNA
tctcattgtcttcacatta

SEQ ID NO: 593 - RNA, 19 nt, synthetic construct
  source 1..19: mol_type = other RNA
gtcttgtcttaggggtgta

SEQ ID NO: 594 - RNA, 19 nt, synthetic construct
  source 1..19: mol_type = other RNA
tcttgtcttaggggtgtga

SEQ ID NO: 595 - RNA, 19 nt, synthetic construct
  source 1..19: mol_type = other RNA
atattcatgtataagtgga

SEQ ID NO: 596 - RNA, 19 nt, synthetic construct
  source 1..19: mol_type = other RNA
catgtataagtggacccta

SEQ ID NO: 597 - RNA, 19 nt, synthetic construct
  source 1..19: mol_type = other RNA
attttcaatttctcctcta

SEQ ID NO: 598 - RNA, 19 nt, synthetic construct
  source 1..19: mol_type = other RNA
ttttcaatttctcctctga

SEQ ID NO: 599 - RNA, 19 nt, synthetic construct
  source 1..19: mol_type = other RNA
tttcaatttctcctctgaa

SEQ ID NO: 600 - DNA, 19 bp, synthetic construct
  source 1..19: mol_type = other DNA
  misc_feature 1: note = RNA
  misc_feature 2..3: note = DNA
  misc_feature 4: note = RNA
  misc_feature 5: note = DNA
  misc_feature 6: note = RNA
  misc_feature 7: note = DNA
  misc_feature 8..9: note = RNA
  misc_feature 10: note = DNA
  misc_feature 11: note = RNA
  misc_feature 12..14: note = DNA
  misc_feature 15..17: note = RNA
  misc_feature 18: note = DNA
  misc_feature 19: note = RNA
gttatctcatatttggcta

SEQ ID NO: 601 - DNA, 19 bp, synthetic construct
  source 1..19: mol_type = other DNA
  misc_feature 1..8: note = RNA
  misc_feature 9: note = DNA
  misc_feature 10..16: note = RNA
  misc_feature 17: note = DNA
  misc_feature 18..19: note = RNA
caagcacgtcaaaagctaa

SEQ ID NO: 602 - DNA, 19 bp, synthetic construct
  source 1..19: mol_type = other DNA
  misc_feature 1..6: note = RNA
  misc_feature 7: note = DNA
  misc_feature 8..14: note = RNA
  misc_feature 15: note = DNA
  misc_feature 16..19: note = RNA
agcacgtcaaaagctacaa

SEQ ID NO: 603 - DNA, 19 bp, synthetic construct
  source 1..19: mol_type = other DNA
  misc_feature 1..2: note = RNA
  misc_feature 3: note = DNA
  misc_feature 4..10: note = RNA
  misc_feature 11: note = DNA
  misc_feature 12..17: note = RNA
  misc_feature 18: note = DNA
  misc_feature 19: note = RNA
cgtcaaaagctacagaata

SEQ ID NO: 604 - DNA, 19 bp, synthetic construct
  source 1..19: mol_type = other DNA
  misc_feature 1: note = RNA
  misc_feature 2: note = DNA
  misc_feature 3..9: note = RNA
  misc_feature 10: note = DNA
  misc_feature 11..16: note = RNA
  misc_feature 17: note = DNA
  misc_feature 18..19: note = RNA
gtcaaaagctacagaatca

SEQ ID NO: 605 - DNA, 19 bp, synthetic construct
  source 1..19: mol_type = other DNA
  misc_feature 1: note = DNA
  misc_feature 2: note = RNA
  misc_feature 3: note = DNA
  misc_feature 4..8: note = RNA
  misc_feature 9: note = DNA
  misc_feature 10..19: note = RNA
tgtaaacatgaaaagggca

SEQ ID NO: 606 - DNA, 19 bp, synthetic construct
  source 1..19: mol_type = other DNA
  misc_feature 1: note = RNA
  misc_feature 2: note = DNA
  misc_feature 3..7: note = RNA
  misc_feature 8: note = DNA
  misc_feature 9..17: note = RNA
  misc_feature 18: note = DNA
  misc_feature 19: note = RNA
gtaaacatgaaaagggcta

SEQ ID NO: 607 - DNA, 19 bp, synthetic construct
  source 1..19: mol_type = other DNA
  misc_feature 1..6: note = RNA
  misc_feature 7: note = DNA
  misc_feature 8..13: note = RNA
  misc_feature 14: note = DNA
  misc_feature 15..16: note = RNA
  misc_feature 17: note = DNA
  misc_feature 18..19: note = RNA
aacagatgagaactggtga

SEQ ID NO: 608 - DNA, 19 bp, synthetic construct
  source 1..19: mol_type = other DNA
  misc_feature 1..5: note = RNA
  misc_feature 6: note = DNA
  misc_feature 7..12: note = RNA
  misc_feature 13: note = DNA
  misc_feature 14..15: note = RNA
  misc_feature 16: note = DNA
  misc_feature 17..19: note = RNA
acagatgagaactggtgga

SEQ ID NO: 609 - DNA, 19 bp, synthetic construct
  source 1..19: mol_type = other DNA
  misc_feature 1..4: note = RNA
  misc_feature 5: note = DNA
  misc_feature 6..11: note = RNA
  misc_feature 12: note = DNA
  misc_feature 13..14: note = RNA
  misc_feature 15: note = DNA
  misc_feature 16..17: note = RNA
  misc_feature 18: note = DNA
  misc_feature 19: note = RNA
cagatgagaactggtggta

SEQ ID NO: 610 - DNA, 19 bp, synthetic construct
  source 1..19: mol_type = other DNA
  misc_feature 1..3: note = RNA
  misc_feature 4: note = DNA
  misc_feature 5..10: note = RNA
  misc_feature 11: note = DNA
  misc_feature 12..13: note = RNA
  misc_feature 14: note = DNA
  misc_feature 15..16: note = RNA
  misc_feature 17..18: note = DNA
  misc_feature 19: note = RNA
agatgagaactggtggtta

SEQ ID NO: 611 - DNA, 19 bp, synthetic construct
  source 1..19: mol_type = other DNA
  misc_feature 1..2: note = RNA
  misc_feature 3: note = DNA
  misc_feature 4..9: note = RNA
  misc_feature 10: note = DNA
  misc_feature 11..12: note = RNA
  misc_feature 13: note = DNA
  misc_feature 14..15: note = RNA
  misc_feature 16..17: note = DNA
  misc_feature 18..19: note = RNA
gatgagaactggtggttaa

SEQ ID NO: 612 - DNA, 19 bp, synthetic construct
  source 1..19: mol_type = other DNA
  misc_feature 1: note = RNA
  misc_feature 2: note = DNA
  misc_feature 3..8: note = RNA
  misc_feature 9: note = DNA
  misc_feature 10..11: note = RNA
  misc_feature 12: note = DNA
  misc_feature 13..14: note = RNA
  misc_feature 15..16: note = DNA
  misc_feature 17..19: note = RNA
atgagaactggtggttaaa

SEQ ID NO: 613 - DNA, 19 bp, synthetic construct
  source 1..19: mol_type = other DNA
  misc_feature 1: note = DNA
  misc_feature 2..7: note = RNA
  misc_feature 8: note = DNA
  misc_feature 9..10: note = RNA
  misc_feature 11: note = DNA
  misc_feature 12..13: note = RNA
  misc_feature 14..15: note = DNA
  misc_feature 16..17: note = RNA
  misc_feature 18: note = DNA
  misc_feature 19: note = RNA
tgagaactggtggttaata

SEQ ID NO: 614 - DNA, 19 bp, synthetic construct
  source 1..19: mol_type = other DNA
  misc_feature 1..6: note = RNA
  misc_feature 7: note = DNA
  misc_feature 8..9: note = RNA
  misc_feature 10: note = DNA
  misc_feature 11..12: note = RNA
  misc_feature 13..14: note = DNA
  misc_feature 15..16: note = RNA
  misc_feature 17: note = DNA
  misc_feature 18..19: note = RNA
gagaactggtggttaataa

SEQ ID NO: 615 - DNA, 19 bp, synthetic construct
  source 1..19: mol_type = other DNA
  misc_feature 1..5: note = RNA
  misc_feature 6: note = DNA
  misc_feature 7..8: note = RNA
  misc_feature 9: note = DNA
  misc_feature 10..11: note = RNA
  misc_feature 12..13: note = DNA
  misc_feature 14..15: note = RNA
  misc_feature 16: note = DNA
  misc_feature 17: note = RNA
  misc_feature 18: note = DNA
  misc_feature 19: note = RNA
agaactggtggttaatata

SEQ ID NO: 616 - DNA, 19 bp, synthetic construct
  source 1..19: mol_type = other DNA
  misc_feature 1..3: note = DNA
  misc_feature 4..7: note = RNA
  misc_feature 8: note = DNA
  misc_feature 9..10: note = RNA
  misc_feature 11: note = DNA
  misc_feature 12..17: note = RNA
  misc_feature 18: note = DNA
  misc_feature 19: note = RNA
tttggaatcatgaaaccta

SEQ ID NO: 617 - DNA, 19 bp, synthetic construct
  source 1..19: mol_type = other DNA
  misc_feature 1..2: note = DNA
  misc_feature 3..6: note = RNA
  misc_feature 7: note = DNA
  misc_feature 8..9: note = RNA
  misc_feature 10: note = DNA
  misc_feature 11..16: note = RNA
  misc_feature 17..18: note = DNA
  misc_feature 19: note = RNA
ttggaatcatgaaacctta

SEQ ID NO: 618 - DNA, 19 bp, synthetic construct
  source 1..19: mol_type = other DNA
  misc_feature 1..3: note = RNA
  misc_feature 4: note = DNA
  misc_feature 5..8: note = RNA
  misc_feature 9: note = DNA
  misc_feature 10..17: note = RNA
  misc_feature 18: note = DNA
  misc_feature 19: note = RNA
aagtaagctagagaaaata

SEQ ID NO: 619 - DNA, 19 bp, synthetic construct
  source 1..19: mol_type = other DNA
  misc_feature 1..2: note = RNA
  misc_feature 3: note = DNA
  misc_feature 4..7: note = RNA
  misc_feature 8: note = DNA
  misc_feature 9..16: note = RNA
  misc_feature 17: note = DNA
  misc_feature 18..19: note = RNA
agtaagctagagaaaatga

SEQ ID NO: 620 - DNA, 19 bp, synthetic construct
  source 1..19: mol_type = other DNA
  misc_feature 1: note = RNA
  misc_feature 2: note = DNA
  misc_feature 3..6: note = RNA
  misc_feature 7: note = DNA
  misc_feature 8..15: note = RNA
  misc_feature 16: note = DNA
  misc_feature 17: note = RNA
  misc_feature 18: note = DNA
  misc_feature 19: note = RNA
gtaagctagagaaaatgta

SEQ ID NO: 621 - DNA, 19 bp, synthetic construct
  source 1..19: mol_type = other DNA
  misc_feature 1..2: note = DNA
  misc_feature 3..4: note = RNA
  misc_feature 5..6: note = DNA
  misc_feature 7..9: note = RNA
  misc_feature 10: note = DNA
  misc_feature 11..15: note = RNA
  misc_feature 16: note = DNA
  misc_feature 17..19: note = RNA
ttcattaaatggaagtgga

SEQ ID NO: 622 - DNA, 19 bp, synthetic construct
  source 1..19: mol_type = other DNA
  misc_feature 1..3: note = RNA
  misc_feature 4: note = DNA
  misc_feature 5: note = RNA
  misc_feature 6..7: note = DNA
  misc_feature 8..9: note = RNA
  misc_feature 10..11: note = DNA
  misc_feature 12: note = RNA
  misc_feature 13: note = DNA
  misc_feature 14..15: note = RNA
  misc_feature 16..17: note = DNA
  misc_feature 18..19: note = RNA
aagtcttcattctcattga

SEQ ID NO: 623 - DNA, 19 bp, synthetic construct
  source 1..19: mol_type = other DNA
  misc_feature 1..2: note = RNA
  misc_feature 3: note = DNA
  misc_feature 4: note = RNA
  misc_feature 5..6: note = DNA
  misc_feature 7..8: note = RNA
  misc_feature 9..10: note = DNA
  misc_feature 11: note = RNA
  misc_feature 12: note = DNA
  misc_feature 13..14: note = RNA
  misc_feature 15..16: note = DNA
  misc_feature 17: note = RNA
  misc_feature 18: note = DNA
  misc_feature 19: note = RNA
agtcttcattctcattgta

SEQ ID NO: 624 - DNA, 19 bp, synthetic construct
  source 1..19: mol_type = other DNA
  misc_feature 1: note = RNA
  misc_feature 2: note = DNA
  misc_feature 3: note = RNA
  misc_feature 4..5: note = DNA
  misc_feature 6..7: note = RNA
  misc_feature 8..9: note = DNA
  misc_feature 10: note = RNA
  misc_feature 11: note = DNA
  misc_feature 12..13: note = RNA
  misc_feature 14..15: note = DNA
  misc_feature 16: note = RNA
  misc_feature 17: note = DNA
  misc_feature 18..19: note = RNA
gtcttcattctcattgtca

SEQ ID NO: 625 - DNA, 19 bp, synthetic construct
  source 1..19: mol_type = other DNA
  misc_feature 1: note = DNA
  misc_feature 2: note = RNA
  misc_feature 3..4: note = DNA
  misc_feature 5..6: note = RNA
  misc_feature 7..8: note = DNA
  misc_feature 9: note = RNA
  misc_feature 10: note = DNA
  misc_feature 11..12: note = RNA
  misc_feature 13..14: note = DNA
  misc_feature 15: note = RNA
  misc_feature 16: note = DNA
  misc_feature 17: note = RNA
  misc_feature 18: note = DNA
  misc_feature 19: note = RNA
tcttcattctcattgtcta

SEQ ID NO: 626 - DNA, 19 bp, synthetic construct
  source 1..19: mol_type = other DNA
  misc_feature 1: note = RNA
  misc_feature 2..3: note = DNA
  misc_feature 4: note = RNA
  misc_feature 5: note = DNA
  misc_feature 6: note = RNA
  misc_feature 7..8: note = DNA
  misc_feature 9..13: note = RNA
  misc_feature 14: note = DNA
  misc_feature 15: note = RNA
  misc_feature 16: note = DNA
  misc_feature 17..19: note = RNA
cttgtcttaggggtgtgga

SEQ ID NO: 627 - DNA, 19 bp, synthetic construct
  source 1..19: mol_type = other DNA
  misc_feature 1: note = DNA
  misc_feature 2: note = RNA
  misc_feature 3..4: note = DNA
  misc_feature 5..6: note = RNA
  misc_feature 7: note = DNA
  misc_feature 8: note = RNA
  misc_feature 9: note = DNA
  misc_feature 10: note = RNA
  misc_feature 11: note = DNA
  misc_feature 12..14: note = RNA
  misc_feature 15: note = DNA
  misc_feature 16..19: note = RNA
tattcatgtataagtggaa

SEQ ID NO: 628 - DNA, 19 bp, synthetic construct
  source 1..19: mol_type = other DNA
  misc_feature 1: note = DNA
  misc_feature 2..3: note = RNA
  misc_feature 4: note = DNA
  misc_feature 5: note = RNA
  misc_feature 6: note = DNA
  misc_feature 7: note = RNA
  misc_feature 8: note = DNA
  misc_feature 9..11: note = RNA
  misc_feature 12: note = DNA
  misc_feature 13..19: note = RNA
tcatgtataagtggaccca

SEQ ID NO: 629 - DNA, 19 bp, synthetic construct
  source 1..19: mol_type = other DNA
  misc_feature 1..4: note = RNA
  misc_feature 5: note = DNA
  misc_feature 6..9: note = RNA
  misc_feature 10: note = DNA
  misc_feature 11: note = RNA
  misc_feature 12..13: note = DNA
  misc_feature 14..17: note = RNA
  misc_feature 18..19: note = DNA
cgagtgaggtattggactt

SEQ ID NO: 630 - DNA, 19 bp, synthetic construct
  source 1..19: mol_type = other DNA
  misc_feature 1..2: note = RNA
  misc_feature 3: note = DNA
  misc_feature 4: note = RNA
  misc_feature 5: note = DNA
  misc_feature 6..7: note = RNA
  misc_feature 8: note = DNA
  misc_feature 9: note = RNA
  misc_feature 10: note = DNA
  misc_feature 11..12: note = RNA
  misc_feature 13: note = DNA
  misc_feature 14..17: note = RNA
  misc_feature 18: note = DNA
  misc_feature 19: note = RNA
gatatagtatggtaagcta

SEQ ID NO: 631 - DNA, 19 bp, synthetic construct
  source 1..19: mol_type = other DNA
  misc_feature 1..4: note = RNA
  misc_feature 5: note = DNA
  misc_feature 6: note = RNA
  misc_feature 7: note = DNA
  misc_feature 8..9: note = RNA
  misc_feature 10: note = DNA
  misc_feature 11: note = RNA
  misc_feature 12: note = DNA
  misc_feature 13..14: note = RNA
  misc_feature 15: note = DNA
  misc_feature 16..19: note = RNA
aagatatagtatggtaagc

SEQ ID NO: 632 - DNA, 19 bp, synthetic construct
  source 1..19: mol_type = other DNA
  misc_feature 1: note = DNA
  misc_feature 2..14: note = RNA
  misc_feature 15..16: note = DNA
  misc_feature 17: note = RNA
  misc_feature 18: note = DNA
  misc_feature 19: note = RNA
tgcggacccacgaattgtc

SEQ ID NO: 633 - DNA, 19 bp, synthetic construct
  source 1..19: mol_type = other DNA
  misc_feature 1..4: note = RNA
  misc_feature 5: note = DNA
  misc_feature 6..8: note = RNA
  misc_feature 9..10: note = DNA
  misc_feature 11..16: note = RNA
  misc_feature 17: note = DNA
  misc_feature 18: note = RNA
  misc_feature 19: note = DNA
ggcgtcacttaagaaatct

SEQ ID NO: 634 - DNA, 19 bp, synthetic construct
  source 1..19: mol_type = other DNA
  misc_feature 1..3: note = RNA
  misc_feature 4: note = DNA
  misc_feature 5..10: note = RNA
  misc_feature 11: note = DNA
  misc_feature 12..14: note = RNA
  misc_feature 15..16: note = DNA
  misc_feature 17..19: note = RNA
agatgaggcgtcacttaag

SEQ ID NO: 635 - DNA, 19 bp, synthetic construct
  source 1..19: mol_type = other DNA
  misc_feature 1..2: note = DNA
  misc_feature 3: note = RNA
  misc_feature 4: note = DNA
  misc_feature 5: note = RNA
  misc_feature 6: note = DNA
  misc_feature 7..10: note = RNA
  misc_feature 11: note = DNA
  misc_feature 12: note = RNA
  misc_feature 13..14: note = DNA
  misc_feature 15..19: note = RNA
ttgtatgaagtcttacggg

SEQ ID NO: 636 - DNA, 19 bp, synthetic construct
  source 1..19: mol_type = other DNA
  misc_feature 1: note = RNA
  misc_feature 2: note = DNA
  misc_feature 3: note = RNA
  misc_feature 4..5: note = DNA
  misc_feature 6: note = RNA
  misc_feature 7..8: note = DNA
  misc_feature 9: note = RNA
  misc_feature 10: note = DNA
  misc_feature 11..13: note = RNA
  misc_feature 14: note = DNA
  misc_feature 15..19: note = RNA
ctcttcttatagctgagcg

SEQ ID NO: 637 - DNA, 19 bp, synthetic construct
  source 1..19: mol_type = other DNA
  misc_feature 1..5: note = RNA
  misc_feature 6: note = DNA
  misc_feature 7..11: note = RNA
  misc_feature 12: note = DNA
  misc_feature 13..14: note = RNA
  misc_feature 15: note = DNA
  misc_feature 16..19: note = RNA
aagcatcacgatgatacag

SEQ ID NO: 638 - DNA, 19 bp, synthetic construct
  source 1..19: mol_type = other DNA
  misc_feature 1..6: note = RNA
  misc_feature 7: note = DNA
  misc_feature 8..12: note = RNA
  misc_feature 13: note = DNA
  misc_feature 14..15: note = RNA
  misc_feature 16: note = DNA
  misc_feature 17..19: note = RNA
gaagcatcacgatgataca

SEQ ID NO: 639 - DNA, 19 bp, synthetic construct
  source 1..19: mol_type = other DNA
  misc_feature 1..2: note = RNA
  misc_feature 3: note = DNA
  misc_feature 4: note = RNA
  misc_feature 5: note = DNA
  misc_feature 6: note = RNA
  misc_feature 7..8: note = DNA
  misc_feature 9..10: note = RNA
  misc_feature 11: note = DNA
  misc_feature 12..13: note = RNA
  misc_feature 14: note = DNA
  misc_feature 15: note = RNA
  misc_feature 16: note = DNA
  misc_feature 17..19: note = RNA
agtatattagtgatatgac

SEQ ID NO: 640 - DNA, 19 bp, synthetic construct
  source 1..19: mol_type = other DNA
  misc_feature 1: note = DNA
  misc_feature 2: note = RNA
  misc_feature 3: note = DNA
  misc_feature 4..5: note = RNA
  misc_feature 6: note = DNA
  misc_feature 7..10: note = RNA
  misc_feature 11: note = DNA
  misc_feature 12..14: note = RNA
  misc_feature 15: note = DNA
  misc_feature 16..18: note = RNA
  misc_feature 19: note = DNA
tatggtaagctaggtaact

SEQ ID NO: 641 - DNA, 19 bp, synthetic construct
  source 1..19: mol_type = other DNA
  misc_feature 1..3: note = RNA
  misc_feature 4: note = DNA
  misc_feature 5: note = RNA
  misc_feature 6..7: note = DNA
  misc_feature 8..10: note = RNA
  misc_feature 11: note = DNA
  misc_feature 12..13: note = RNA
  misc_feature 14..15: note = DNA
  misc_feature 16..19: note = RNA
ggctattaggtagttaaga

SEQ ID NO: 642 - DNA, 19 bp, synthetic construct
  source 1..19: mol_type = other DNA
  misc_feature 1..4: note = RNA
  misc_feature 5: note = DNA
  misc_feature 6: note = RNA
  misc_feature 7..8: note = DNA
  misc_feature 9..11: note = RNA
  misc_feature 12: note = DNA
  misc_feature 13..14: note = RNA
  misc_feature 15..16: note = DNA
  misc_feature 17..19: note = RNA
aggctattaggtagttaag

SEQ ID NO: 643 - DNA, 19 bp, synthetic construct
  source 1..19: mol_type = other DNA
  misc_feature 1: note = DNA
  misc_feature 2..5: note = RNA
  misc_feature 6..8: note = DNA
  misc_feature 9..10: note = RNA
  misc_feature 11..12: note = DNA
  misc_feature 13..14: note = RNA
  misc_feature 15: note = DNA
  misc_feature 16..19: note = RNA
taccatttggttgatagag

SEQ ID NO: 644 - DNA, 19 bp, synthetic construct
  source 1..19: mol_type = other DNA
  misc_feature 1..2: note = RNA
  misc_feature 3: note = DNA
  misc_feature 4..5: note = RNA
  misc_feature 6..7: note = DNA
  misc_feature 8..11: note = RNA
  misc_feature 12..14: note = DNA
  misc_feature 15..16: note = RNA
  misc_feature 17..18: note = DNA
  misc_feature 19: note = RNA
gatgcttaccatttggttg

SEQ ID NO: 645 - DNA, 19 bp, synthetic construct
  source 1..19: mol_type = other DNA
  misc_feature 1: note = RNA
  misc_feature 2: note = DNA
  misc_feature 3..4: note = RNA
  misc_feature 5..7: note = DNA
  misc_feature 8..10: note = RNA
  misc_feature 11: note = DNA
  misc_feature 12..14: note = RNA
  misc_feature 15: note = DNA
  misc_feature 16..19: note = RNA
ataatttagctcagtagag

SEQ ID NO: 646 - DNA, 19 bp, synthetic construct
  source 1..19: mol_type = other DNA
  misc_feature 1: note = DNA
  misc_feature 2: note = RNA
  misc_feature 3: note = DNA
  misc_feature 4..5: note = RNA
  misc_feature 6..8: note = DNA
  misc_feature 9..11: note = RNA
  misc_feature 12: note = DNA
  misc_feature 13..15: note = RNA
  misc_feature 16: note = DNA
  misc_feature 17..19: note = RNA
tataatttagctcagtaga

SEQ ID NO: 647 - DNA, 19 bp, synthetic construct
  source 1..19: mol_type = other DNA
  misc_feature 1..2: note = RNA
  misc_feature 3: note = DNA
  misc_feature 4..6: note = RNA
  misc_feature 7: note = DNA
  misc_feature 8: note = RNA
  misc_feature 9: note = DNA
  misc_feature 10: note = RNA
  misc_feature 11: note = DNA
  misc_feature 12..13: note = RNA
  misc_feature 14..16: note = DNA
  misc_feature 17..19: note = RNA
gctggatctataatttagc

SEQ ID NO: 648 - DNA, 19 bp, synthetic construct
  source 1..19: mol_type = other DNA
  misc_feature 1..3: note = RNA
  misc_feature 4..5: note = DNA
  misc_feature 6..13: note = RNA
  misc_feature 14..15: note = DNA
  misc_feature 16: note = RNA
  misc_feature 17: note = DNA
  misc_feature 18: note = RNA
  misc_feature 19: note = DNA
gagttagcaacacttgtgt

SEQ ID NO: 649 - DNA, 19 bp, synthetic construct
  source 1..19: mol_type = other DNA
  misc_feature 1: note = DNA
  misc_feature 2..4: note = RNA
  misc_feature 5: note = DNA
  misc_feature 6: note = RNA
  misc_feature 7..8: note = DNA
  misc_feature 9..11: note = RNA
  misc_feature 12..13: note = DNA
  misc_feature 14..19: note = RNA
tcactattgagttagcaac

SEQ ID NO: 650 - DNA, 19 bp, synthetic construct
  source 1..19: mol_type = other DNA
  misc_feature 1..5: note = RNA
  misc_feature 6: note = DNA
  misc_feature 7..9: note = RNA
  misc_feature 10..11: note = DNA
  misc_feature 12..17: note = RNA
  misc_feature 18: note = DNA
  misc_feature 19: note = RNA
aggcgtcacttaagaaatc

SEQ ID NO: 651 - DNA, 19 bp, synthetic construct
  source 1..19: mol_type = other DNA
  misc_feature 1..2: note = RNA
  misc_feature 3: note = DNA
  misc_feature 4..9: note = RNA
  misc_feature 10: note = DNA
  misc_feature 11..13: note = RNA
  misc_feature 14..15: note = DNA
  misc_feature 16..19: note = RNA
gatgaggcgtcacttaaga

SEQ ID NO: 652 - DNA, 19 bp, synthetic construct
  source 1..19: mol_type = other DNA
  misc_feature 1: note = DNA
  misc_feature 2..4: note = RNA
  misc_feature 5: note = DNA
  misc_feature 6..11: note = RNA
  misc_feature 12: note = DNA
  misc_feature 13..15: note = RNA
  misc_feature 16..17: note = DNA
  misc_feature 18..19: note = RNA
tagatgaggcgtcacttaa

SEQ ID NO: 653 - DNA, 19 bp, synthetic construct
  source 1..19: mol_type = other DNA
  misc_feature 1: note = RNA
  misc_feature 2..3: note = DNA
  misc_feature 4..8: note = RNA
  misc_feature 9: note = DNA
  misc_feature 10: note = RNA
  misc_feature 11..12: note = DNA
  misc_feature 13: note = RNA
  misc_feature 14..15: note = DNA
  misc_feature 16: note = RNA
  misc_feature 17: note = DNA
  misc_feature 18..19: note = RNA
gttgaggctcttcttatag

SEQ ID NO: 654 - DNA, 19 bp, synthetic construct
  source 1..19: mol_type = other DNA
  misc_feature 1..2: note = RNA
  misc_feature 3..4: note = DNA
  misc_feature 5..9: note = RNA
  misc_feature 10: note = DNA
  misc_feature 11: note = RNA
  misc_feature 12..13: note = DNA
  misc_feature 14: note = RNA
  misc_feature 15..16: note = DNA
  misc_feature 17: note = RNA
  misc_feature 18: note = DNA
  misc_feature 19: note = RNA
ggttgaggctcttcttata

SEQ ID NO: 655 - DNA, 19 bp, synthetic construct
  source 1..19: mol_type = other DNA
  misc_feature 1: note = DNA
  misc_feature 2..3: note = RNA
  misc_feature 4..5: note = DNA
  misc_feature 6..10: note = RNA
  misc_feature 11: note = DNA
  misc_feature 12: note = RNA
  misc_feature 13..14: note = DNA
  misc_feature 15: note = RNA
  misc_feature 16..17: note = DNA
  misc_feature 18: note = RNA
  misc_feature 19: note = DNA
tggttgaggctcttcttat

SEQ ID NO: 656 - DNA, 19 bp, synthetic construct
  source 1..19: mol_type = other DNA
  misc_feature 1: note = DNA
  misc_feature 2..4: note = RNA
  misc_feature 5..8: note = DNA
  misc_feature 9..12: note = RNA
  misc_feature 13: note = DNA
  misc_feature 14..15: note = RNA
  misc_feature 16..17: note = DNA
  misc_feature 18: note = RNA
  misc_feature 19: note = DNA
tagcttttgacgtgcttgt

SEQ ID NO: 657 - DNA, 19 bp, synthetic construct
  source 1..19: mol_type = other DNA
  misc_feature 1: note = DNA
  misc_feature 2..3: note = RNA
  misc_feature 4: note = DNA
  misc_feature 5..7: note = RNA
  misc_feature 8: note = DNA
  misc_feature 9..11: note = RNA
  misc_feature 12..13: note = DNA
  misc_feature 14: note = RNA
  misc_feature 15: note = DNA
  misc_feature 16: note = RNA
  misc_feature 17: note = DNA
  misc_feature 18..19: note = RNA
tgataaatagattctgtag

SEQ ID NO: 658 - DNA, 19 bp, synthetic construct
  source 1..19: mol_type = other DNA
  misc_feature 1..2: note = DNA
  misc_feature 3: note = RNA
  misc_feature 4..5: note = DNA
  misc_feature 6..10: note = RNA
  misc_feature 11: note = DNA
  misc_feature 12..15: note = RNA
  misc_feature 16..19: note = DNA
ttgttggcagtgcagtttt

SEQ ID NO: 659 - DNA, 19 bp, synthetic construct
  source 1..19: mol_type = other DNA
  misc_feature 1: note = RNA
  misc_feature 2..3: note = DNA
  misc_feature 4: note = RNA
  misc_feature 5..6: note = DNA
  misc_feature 7..11: note = RNA
  misc_feature 12: note = DNA
  misc_feature 13..16: note = RNA
  misc_feature 17..19: note = DNA
cttgttggcagtgcagttt

SEQ ID NO: 660 - DNA, 19 bp, synthetic construct
  source 1..19: mol_type = other DNA
  misc_feature 1..3: note = DNA
  misc_feature 4..6: note = RNA
  misc_feature 7: note = DNA
  misc_feature 8..9: note = RNA
  misc_feature 10..11: note = DNA
  misc_feature 12..13: note = RNA
  misc_feature 14..15: note = DNA
  misc_feature 16: note = RNA
  misc_feature 17: note = DNA
  misc_feature 18..19: note = RNA
tttccatacttgattctca

SEQ ID NO: 661 - DNA, 19 bp, synthetic construct
  source 1..19: mol_type = other DNA
  misc_feature 1..4: note = RNA
  misc_feature 5: note = DNA
  misc_feature 6: note = RNA
  misc_feature 7..8: note = DNA
  misc_feature 9..17: note = RNA
  misc_feature 18..19: note = DNA
cacatattaaccaccagtt

SEQ ID NO: 662 - DNA, 19 bp, synthetic construct
  source 1..19: mol_type = other DNA
  misc_feature 1: note = DNA
  misc_feature 2..5: note = RNA
  misc_feature 6: note = DNA
  misc_feature 7: note = RNA
  misc_feature 8..9: note = DNA
  misc_feature 10..18: note = RNA
  misc_feature 19: note = DNA
tcacatattaaccaccagt

SEQ ID NO: 663 - DNA, 19 bp, synthetic construct
  source 1..19: mol_type = other DNA
  misc_feature 1: note = DNA
  misc_feature 2..6: note = RNA
  misc_feature 7: note = DNA
  misc_feature 8: note = RNA
  misc_feature 9: note = DNA
  misc_feature 10..11: note = RNA
  misc_feature 12: note = DNA
  misc_feature 13: note = RNA
  misc_feature 14: note = DNA
  misc_feature 15: note = RNA
  misc_feature 16: note = DNA
  misc_feature 17..18: note = RNA
  misc_feature 19: note = DNA
taggaatatagtgtataat

SEQ ID NO: 664 - DNA, 19 bp, synthetic construct
  source 1..19: mol_type = other DNA
  misc_feature 1..2: note = DNA
  misc_feature 3: note = RNA
  misc_feature 4: note = DNA
  misc_feature 5: note = RNA
  misc_feature 6: note = DNA
  misc_feature 7: note = RNA
  misc_feature 8..9: note = DNA
  misc_feature 10..11: note = RNA
  misc_feature 12: note = DNA
  misc_feature 13..14: note = RNA
  misc_feature 15..17: note = DNA
  misc_feature 18..19: note = RNA
ttctgtattggtaatttac

SEQ ID NO: 665 - DNA, 19 bp, synthetic construct
  source 1..19: mol_type = other DNA
  misc_feature 1..4: note = RNA
  misc_feature 5: note = DNA
  misc_feature 6: note = RNA
  misc_feature 7: note = DNA
  misc_feature 8..10: note = RNA
  misc_feature 11: note = DNA
  misc_feature 12..13: note = RNA
  misc_feature 14: note = DNA
  misc_feature 15..17: note = RNA
  misc_feature 18..19: note = DNA
ggaatatgactaatcagtt

SEQ ID NO: 666 - DNA, 19 bp, synthetic construct
  source 1..19: mol_type = other DNA
  misc_feature 1: note = DNA
  misc_feature 2..7: note = RNA
  misc_feature 8..9: note = DNA
  misc_feature 10: note = RNA
  misc_feature 11..12: note = DNA
  misc_feature 13: note = RNA
  misc_feature 14: note = DNA
  misc_feature 15: note = RNA
  misc_feature 16: note = DNA
  misc_feature 17..18: note = RNA
  misc_feature 19: note = DNA
taagaacttattctatagt

SEQ ID NO: 667 - DNA, 19 bp, synthetic construct
  source 1..19: mol_type = other DNA
  misc_feature 1..2: note = DNA
  misc_feature 3..7: note = RNA
  misc_feature 8: note = DNA
  misc_feature 9: note = RNA
  misc_feature 10..11: note = DNA
  misc_feature 12: note = RNA
  misc_feature 13..14: note = DNA
  misc_feature 15: note = RNA
  misc_feature 16: note = DNA
  misc_feature 17..19: note = RNA
ttgaggctcttcttatagc

SEQ ID NO: 668 - DNA, 19 bp, synthetic construct
  source 1..19: mol_type = other DNA
  misc_feature 1..2: note = RNA
  misc_feature 3: note = DNA
  misc_feature 4: note = RNA
  misc_feature 5..6: note = DNA
  misc_feature 7..8: note = RNA
  misc_feature 9: note = DNA
  misc_feature 10: note = RNA
  misc_feature 11..12: note = DNA
  misc_feature 13..16: note = RNA
  misc_feature 17..19: note = DNA
agtcttaatcttgaccttt

SEQ ID NO: 669 - DNA, 19 bp, synthetic construct
  source 1..19: mol_type = other DNA
  misc_feature 1: note = DNA
  misc_feature 2..3: note = RNA
  misc_feature 4: note = DNA
  misc_feature 5: note = RNA
  misc_feature 6..7: note = DNA
  misc_feature 8..9: note = RNA
  misc_feature 10: note = DNA
  misc_feature 11: note = RNA
  misc_feature 12..13: note = DNA
  misc_feature 14..17: note = RNA
  misc_feature 18..19: note = DNA
tagtcttaatcttgacctt

SEQ ID NO: 670 - DNA, 19 bp, synthetic construct
  source 1..19: mol_type = other DNA
  misc_feature 1: note = DNA
  misc_feature 2..4: note = RNA
  misc_feature 5..8: note = DNA
  misc_feature 9..10: note = RNA
  misc_feature 11: note = DNA
  misc_feature 12: note = RNA
  misc_feature 13..14: note = DNA
  misc_feature 15..16: note = RNA
  misc_feature 17: note = DNA
  misc_feature 18: note = RNA
  misc_feature 19: note = DNA
taagttttagtcttaatct

SEQ ID NO: 671 - DNA, 19 bp, synthetic construct
  source 1..19: mol_type = other DNA
  misc_feature 1: note = RNA
  misc_feature 2: note = DNA
  misc_feature 3..4: note = RNA
  misc_feature 5: note = DNA
  misc_feature 6..10: note = RNA
  misc_feature 11..12: note = DNA
  misc_feature 13..14: note = RNA
  misc_feature 15..17: note = DNA
  misc_feature 18: note = RNA
  misc_feature 19: note = DNA
ataatgacacttcatttgt

SEQ ID NO: 672 - DNA, 19 bp, synthetic construct
  source 1..19: mol_type = other DNA
  misc_feature 1: note = DNA
  misc_feature 2..5: note = RNA
  misc_feature 6: note = DNA
  misc_feature 7..11: note = RNA
  misc_feature 12..14: note = DNA
  misc_feature 15: note = RNA
  misc_feature 16: note = DNA
  misc_feature 17..19: note = RNA
tgggatagaaatttgtgag

SEQ ID NO: 673 - DNA, 19 bp, synthetic construct
  source 1..19: mol_type = other DNA
  misc_feature 1: note = DNA
  misc_feature 2: note = RNA
  misc_feature 3..4: note = DNA
  misc_feature 5..9: note = RNA
  misc_feature 10: note = DNA
  misc_feature 11..14: note = RNA
  misc_feature 15..18: note = DNA
  misc_feature 19: note = RNA
tgttggcagtgcagtttta

SEQ ID NO: 674 - DNA, 19 bp, synthetic construct
  source 1..19: mol_type = other DNA
  misc_feature 1..2: note = RNA
  misc_feature 3..4: note = DNA
  misc_feature 5: note = RNA
  misc_feature 6..7: note = DNA
  misc_feature 8..12: note = RNA
  misc_feature 13: note = DNA
  misc_feature 14..17: note = RNA
  misc_feature 18..19: note = DNA
acttgttggcagtgcagtt

SEQ ID NO: 675 - DNA, 19 bp, synthetic construct
  source 1..19: mol_type = other DNA
  misc_feature 1: note = RNA
  misc_feature 2: note = DNA
  misc_feature 3..5: note = RNA
  misc_feature 6: note = DNA
  misc_feature 7..9: note = RNA
  misc_feature 10..11: note = DNA
  misc_feature 12: note = RNA
  misc_feature 13: note = DNA
  misc_feature 14: note = RNA
  misc_feature 15: note = DNA
  misc_feature 16..18: note = RNA
  misc_feature 19: note = DNA
ataaatagattctgtagct

SEQ ID NO: 676 - DNA, 19 bp, synthetic construct
  source 1..19: mol_type = other DNA
  misc_feature 1..2: note = RNA
  misc_feature 3: note = DNA
  misc_feature 4..6: note = RNA
  misc_feature 7: note = DNA
  misc_feature 8..10: note = RNA
  misc_feature 11..12: note = DNA
  misc_feature 13: note = RNA
  misc_feature 14: note = DNA
  misc_feature 15: note = RNA
  misc_feature 16: note = DNA
  misc_feature 17..19: note = RNA
gataaatagattctgtagc

SEQ ID NO: 677 - DNA, 19 bp, synthetic construct
  source 1..19: mol_type = other DNA
  misc_feature 1: note = DNA
  misc_feature 2: note = RNA
  misc_feature 3: note = DNA
  misc_feature 4..5: note = RNA
  misc_feature 6: note = DNA
  misc_feature 7..11: note = RNA
  misc_feature 12: note = DNA
  misc_feature 13..15: note = RNA
  misc_feature 16..19: note = DNA
tatggtaacaataagtttt

SEQ ID NO: 678 - DNA, 19 bp, synthetic construct
  source 1..19: mol_type = other DNA
  misc_feature 1..3: note = RNA
  misc_feature 4: note = DNA
  misc_feature 5: note = RNA
  misc_feature 6..7: note = DNA
  misc_feature 8..16: note = RNA
  misc_feature 17..18: note = DNA
  misc_feature 19: note = RNA
acatattaaccaccagttc

SEQ ID NO: 679 - DNA, 19 bp, synthetic construct
  source 1..19: mol_type = other DNA
  misc_feature 1..4: note = RNA
  misc_feature 5: note = DNA
  misc_feature 6: note = RNA
  misc_feature 7..8: note = DNA
  misc_feature 9..17: note = RNA
  misc_feature 18..19: note = DNA
cacatattaaccaccagtt

SEQ ID NO: 680 - DNA, 19 bp, synthetic construct
  source 1..19: mol_type = other DNA
  misc_feature 1: note = DNA
  misc_feature 2..5: note = RNA
  misc_feature 6: note = DNA
  misc_feature 7: note = RNA
  misc_feature 8..9: note = DNA
  misc_feature 10..18: note = RNA
  misc_feature 19: note = DNA
tcacatattaaccaccagt

SEQ ID NO: 681 - DNA, 19 bp, synthetic construct
  source 1..19: mol_type = other DNA
  misc_feature 1: note = RNA
  misc_feature 2: note = DNA
  misc_feature 3..6: note = RNA
  misc_feature 7: note = DNA
  misc_feature 8: note = RNA
  misc_feature 9..10: note = DNA
  misc_feature 11..19: note = RNA
gtcacatattaaccaccag

SEQ ID NO: 682 - DNA, 19 bp, synthetic construct
  source 1..19: mol_type = other DNA
  misc_feature 1: note = RNA
  misc_feature 2..5: note = DNA
  misc_feature 6..18: note = RNA
  misc_feature 19: note = DNA
attttgcggacccacgaat

SEQ ID NO: 683 - DNA, 19 bp, synthetic construct
  source 1..19: mol_type = other DNA
  misc_feature 1: note = DNA
  misc_feature 2..3: note = RNA
  misc_feature 4..6: note = DNA
  misc_feature 7: note = RNA
  misc_feature 8..9: note = DNA
  misc_feature 10: note = RNA
  misc_feature 11: note = DNA
  misc_feature 12..16: note = RNA
  misc_feature 17: note = DNA
  misc_feature 18: note = RNA
  misc_feature 19: note = DNA
tactttattgtaggaatat

SEQ ID NO: 684 - DNA, 19 bp, synthetic construct
  source 1..19: mol_type = other DNA
  misc_feature 1..4: note = RNA
  misc_feature 5: note = DNA
  misc_feature 6..8: note = RNA
  misc_feature 9: note = DNA
  misc_feature 10: note = RNA
  misc_feature 11: note = DNA
  misc_feature 12: note = RNA
  misc_feature 13: note = DNA
  misc_feature 14..15: note = RNA
  misc_feature 16: note = DNA
  misc_feature 17: note = RNA
  misc_feature 18..19: note = DNA
aaaatagctatatcctatt

SEQ ID NO: 685 - DNA, 19 bp, synthetic construct
  source 1..19: mol_type = other DNA
  misc_feature 1: note = DNA
  misc_feature 2..4: note = RNA
  misc_feature 5: note = DNA
  misc_feature 6..8: note = RNA
  misc_feature 9: note = DNA
  misc_feature 10..13: note = RNA
  misc_feature 14: note = DNA
  misc_feature 15..18: note = RNA
  misc_feature 19: note = DNA
tagctcagtagagtggact

SEQ ID NO: 686 - DNA, 19 bp, synthetic construct
  source 1..19: mol_type = other DNA
  misc_feature 1: note = RNA
  misc_feature 2..3: note = DNA
  misc_feature 4..7: note = RNA
  misc_feature 8..9: note = DNA
  misc_feature 10: note = RNA
  misc_feature 11..12: note = DNA
  misc_feature 13..15: note = RNA
  misc_feature 16..17: note = DNA
  misc_feature 18: note = RNA
  misc_feature 19: note = DNA
attaaaattgttggattat

SEQ ID NO: 687 - DNA, 19 bp, synthetic construct
  source 1..19: mol_type = other DNA
  misc_feature 1..3: note = RNA
  misc_feature 4: note = DNA
  misc_feature 5: note = RNA
  misc_feature 6..7: note = DNA
  misc_feature 8..9: note = RNA
  misc_feature 10: note = DNA
  misc_feature 11: note = RNA
  misc_feature 12..13: note = DNA
  misc_feature 14..16: note = RNA
  misc_feature 17: note = DNA
  misc_feature 18: note = RNA
  misc_feature 19: note = DNA
caatattgatgttacatat

SEQ ID NO: 688 - DNA, 19 bp, synthetic construct
  source 1..19: mol_type = other DNA
  misc_feature 1..2: note = RNA
  misc_feature 3: note = DNA
  misc_feature 4: note = RNA
  misc_feature 5: note = DNA
  misc_feature 6: note = RNA
  misc_feature 7: note = DNA
  misc_feature 8: note = RNA
  misc_feature 9: note = DNA
  misc_feature 10..11: note = RNA
  misc_feature 12: note = DNA
  misc_feature 13..15: note = RNA
  misc_feature 16..17: note = DNA
  misc_feature 18..19: note = RNA
agtatctctcatgggttca

SEQ ID NO: 689 - DNA, 19 bp, synthetic construct
  source 1..19: mol_type = other DNA
  misc_feature 1..2: note = RNA
  misc_feature 3: note = DNA
  misc_feature 4..7: note = RNA
  misc_feature 8: note = DNA
  misc_feature 9: note = RNA
  misc_feature 10: note = DNA
  misc_feature 11..13: note = RNA
  misc_feature 14..15: note = DNA
  misc_feature 16..19: note = RNA
agtgccctgtaaattaaga

SEQ ID NO: 690 - DNA, 19 bp, synthetic construct
  source 1..19: mol_type = other DNA
  misc_feature 1: note = DNA
  misc_feature 2..3: note = RNA
  misc_feature 4: note = DNA
  misc_feature 5..8: note = RNA
  misc_feature 9: note = DNA
  misc_feature 10: note = RNA
  misc_feature 11: note = DNA
  misc_feature 12..14: note = RNA
  misc_feature 15..16: note = DNA
  misc_feature 17..19: note = RNA
tagtgccctgtaaattaag

SEQ ID NO: 691 - DNA, 19 bp, synthetic construct
  source 1..19: mol_type = other DNA
  misc_feature 1: note = RNA
  misc_feature 2..3: note = DNA
  misc_feature 4..5: note = RNA
  misc_feature 6: note = DNA
  misc_feature 7..9: note = RNA
  misc_feature 10: note = DNA
  misc_feature 11..13: note = RNA
  misc_feature 14..15: note = DNA
  misc_feature 16: note = RNA
  misc_feature 17: note = DNA
  misc_feature 18: note = RNA
  misc_feature 19: note = DNA
attgataaatagattctgt

SEQ ID NO: 692 - DNA, 19 bp, synthetic construct
  source 1..19: mol_type = other DNA
  misc_feature 1: note = DNA
  misc_feature 2..3: note = RNA
  misc_feature 4: note = DNA
  misc_feature 5: note = RNA
  misc_feature 6..7: note = DNA
  misc_feature 8: note = RNA
  misc_feature 9: note = DNA
  misc_feature 10: note = RNA
  misc_feature 11: note = DNA
  misc_feature 12..13: note = RNA
  misc_feature 14: note = DNA
  misc_feature 15..16: note = RNA
  misc_feature 17: note = DNA
  misc_feature 18..19: note = RNA
tagtattctgtaatcctca

SEQ ID NO: 693 - DNA, 19 bp, synthetic construct
  source 1..19: mol_type = other DNA
  misc_feature 1..2: note = RNA
  misc_feature 3: note = DNA
  misc_feature 4..5: note = RNA
  misc_feature 6..7: note = DNA
  misc_feature 8..9: note = RNA
  misc_feature 10: note = DNA
  misc_feature 11: note = RNA
  misc_feature 12..13: note = DNA
  misc_feature 14..19: note = RNA
aatacttagtattaaagaa

SEQ ID NO: 694 - DNA, 19 bp, synthetic construct
  source 1..19: mol_type = other DNA
  misc_feature 1: note = RNA
  misc_feature 2..3: note = DNA
  misc_feature 4..5: note = RNA
  misc_feature 6..7: note = DNA
  misc_feature 8..9: note = RNA
  misc_feature 10: note = DNA
  misc_feature 11: note = RNA
  misc_feature 12..14: note = DNA
  misc_feature 15..19: note = RNA
attagttaatatttggaga

SEQ ID NO: 695 - DNA, 19 bp, synthetic construct
  source 1..19: mol_type = other DNA
  misc_feature 1: note = RNA
  misc_feature 2..3: note = DNA
  misc_feature 4..5: note = RNA
  misc_feature 6..7: note = DNA
  misc_feature 8..12: note = RNA
  misc_feature 13: note = DNA
  misc_feature 14..15: note = RNA
  misc_feature 16: note = DNA
  misc_feature 17: note = RNA
  misc_feature 18: note = DNA
  misc_feature 19: note = RNA
gttaattacacatcctcta

SEQ ID NO: 696 - DNA, 19 bp, synthetic construct
  source 1..19: mol_type = other DNA
  misc_feature 1..2: note = RNA
  misc_feature 3..5: note = DNA
  misc_feature 6..7: note = RNA
  misc_feature 8: note = DNA
  misc_feature 9..12: note = RNA
  misc_feature 13..14: note = DNA
  misc_feature 15..17: note = RNA
  misc_feature 18..19: note = DNA
actttagtcaacttaaatt

SEQ ID NO: 697 - DNA, 19 bp, synthetic construct
  source 1..19: mol_type = other DNA
  misc_feature 1: note = RNA
  misc_feature 2: note = DNA
  misc_feature 3: note = RNA
  misc_feature 4..5: note = DNA
  misc_feature 6: note = RNA
  misc_feature 7: note = DNA
  misc_feature 8: note = RNA
  misc_feature 9: note = DNA
  misc_feature 10..11: note = RNA
  misc_feature 12: note = DNA
  misc_feature 13..14: note = RNA
  misc_feature 15: note = DNA
  misc_feature 16..19: note = RNA
gtattctgtaatcctcaca

SEQ ID NO: 698 - DNA, 19 bp, synthetic construct
  source 1..19: mol_type = other DNA
  misc_feature 1..3: note = RNA
  misc_feature 4: note = DNA
  misc_feature 5: note = RNA
  misc_feature 6..7: note = DNA
  misc_feature 8: note = RNA
  misc_feature 9: note = DNA
  misc_feature 10: note = RNA
  misc_feature 11..12: note = DNA
  misc_feature 13: note = RNA
  misc_feature 14: note = DNA
  misc_feature 15: note = RNA
  misc_feature 16: note = DNA
  misc_feature 17..19: note = RNA
gagtattgtgttgtatgaa

SEQ ID NO: 699 - DNA, 19 bp, synthetic construct
  source 1..19: mol_type = other DNA
  misc_feature 1..2: note = RNA
  misc_feature 3..4: note = DNA
  misc_feature 5..6: note = RNA
  misc_feature 7..8: note = DNA
  misc_feature 9..10: note = RNA
  misc_feature 11: note = DNA
  misc_feature 12: note = RNA
  misc_feature 13..15: note = DNA
  misc_feature 16..19: note = RNA
aattagttaatatttggag

SEQ ID NO: 700 - DNA, 19 bp, synthetic construct
  source 1..19: mol_type = other DNA
  misc_feature 1..2: note = DNA
  misc_feature 3..4: note = RNA
  misc_feature 5: note = DNA
  misc_feature 6: note = RNA
  misc_feature 7: note = DNA
  misc_feature 8: note = RNA
  misc_feature 9..10: note = DNA
  misc_feature 11..12: note = RNA
  misc_feature 13: note = DNA
  misc_feature 14..15: note = RNA
  misc_feature 16: note = DNA
  misc_feature 17: note = RNA
  misc_feature 18: note = DNA
  misc_feature 19: note = RNA
ttagtatattagtgatatg

SEQ ID NO: 701 - DNA, 19 bp, synthetic construct
  source 1..19: mol_type = other DNA
  misc_feature 1: note = DNA
  misc_feature 2: note = RNA
  misc_feature 3..4: note = DNA
  misc_feature 5..6: note = RNA
  misc_feature 7: note = DNA
  misc_feature 8..9: note = RNA
  misc_feature 10: note = DNA
  misc_feature 11: note = RNA
  misc_feature 12: note = DNA
  misc_feature 13..15: note = RNA
  misc_feature 16: note = DNA
  misc_feature 17..18: note = RNA
  misc_feature 19: note = DNA
tattagtgatatgactaat

SEQ ID NO: 702 - DNA, 19 bp, synthetic construct
  source 1..19: mol_type = other DNA
  misc_feature 1..4: note = RNA
  misc_feature 5..6: note = DNA
  misc_feature 7..8: note = RNA
  misc_feature 9: note = DNA
  misc_feature 10..12: note = RNA
  misc_feature 13: note = DNA
  misc_feature 14..16: note = RNA
  misc_feature 17..18: note = DNA
  misc_feature 19: note = RNA
gaaattgataaatagattc

SEQ ID NO: 703 - DNA, 19 bp, synthetic construct
  source 1..19: mol_type = other DNA
  misc_feature 1..2: note = DNA
  misc_feature 3..8: note = RNA
  misc_feature 9: note = DNA
  misc_feature 10: note = RNA
  misc_feature 11: note = DNA
  misc_feature 12..13: note = RNA
  misc_feature 14..15: note = DNA
  misc_feature 16..17: note = RNA
  misc_feature 18..19: note = DNA
ttagaagatatggttaatt

SEQ ID NO: 704 - DNA, 19 bp, synthetic construct
  source 1..19: mol_type = other DNA
  misc_feature 1..2: note = DNA
  misc_feature 3..4: note = RNA
  misc_feature 5..6: note = DNA
  misc_feature 7..11: note = RNA
  misc_feature 12: note = DNA
  misc_feature 13..14: note = RNA
  misc_feature 15: note = DNA
  misc_feature 16: note = RNA
  misc_feature 17: note = DNA
  misc_feature 18..19: note = RNA
ttaattacacatcctctac

SEQ ID NO: 705 - DNA, 19 bp, synthetic construct
  source 1..19: mol_type = other DNA
  misc_feature 1: note = RNA
  misc_feature 2: note = DNA
  misc_feature 3..6: note = RNA
  misc_feature 7: note = DNA
  misc_feature 8: note = RNA
  misc_feature 9..10: note = DNA
  misc_feature 11..14: note = RNA
  misc_feature 15..17: note = DNA
  misc_feature 18: note = RNA
  misc_feature 19: note = DNA
gtgaggtattggactttct

SEQ ID NO: 706 - DNA, 19 bp, synthetic construct
  source 1..19: mol_type = other DNA
  misc_feature 1..3: note = RNA
  misc_feature 4..5: note = DNA
  misc_feature 6..8: note = RNA
  misc_feature 9..10: note = DNA
  misc_feature 11..17: note = RNA
  misc_feature 18..19: note = DNA
aacttaaattaccaaagtt

SEQ ID NO: 707 - DNA, 19 bp, synthetic construct
  source 1..19: mol_type = other DNA
  misc_feature 1..2: note = DNA
  misc_feature 3..4: note = RNA
  misc_feature 5..6: note = DNA
  misc_feature 7..8: note = RNA
  misc_feature 9: note = DNA
  misc_feature 10: note = RNA
  misc_feature 11..13: note = DNA
  misc_feature 14..19: note = RNA
ttagttaatatttggagag

SEQ ID NO: 708 - DNA, 19 bp, synthetic construct
  source 1..19: mol_type = other DNA
  misc_feature 1..3: note = RNA
  misc_feature 4: note = DNA
  misc_feature 5..10: note = RNA
  misc_feature 11..12: note = DNA
  misc_feature 13: note = RNA
  misc_feature 14..15: note = DNA
  misc_feature 16: note = RNA
  misc_feature 17: note = DNA
  misc_feature 18: note = RNA
  misc_feature 19: note = DNA
agataagaacttattctat

SEQ ID NO: 709 - DNA, 19 bp, synthetic construct
  source 1..19: mol_type = other DNA
  misc_feature 1: note = DNA
  misc_feature 2: note = RNA
  misc_feature 3..4: note = DNA
  misc_feature 5..6: note = RNA
  misc_feature 7: note = DNA
  misc_feature 8: note = RNA
  misc_feature 9: note = DNA
  misc_feature 10: note = RNA
  misc_feature 11..12: note = DNA
  misc_feature 13..14: note = RNA
  misc_feature 15: note = DNA
  misc_feature 16..17: note = RNA
  misc_feature 18: note = DNA
  misc_feature 19: note = RNA
tgttagtatattagtgata

SEQ ID NO: 710 - DNA, 19 bp, synthetic construct
  source 1..19: mol_type = other DNA
  misc_feature 1: note = DNA
  misc_feature 2..3: note = RNA
  misc_feature 4..5: note = DNA
  misc_feature 6..7: note = RNA
  misc_feature 8..9: note = DNA
  misc_feature 10..14: note = RNA
  misc_feature 15: note = DNA
  misc_feature 16..17: note = RNA
  misc_feature 18: note = DNA
  misc_feature 19: note = RNA
tggttaattacacatcctc

SEQ ID NO: 711 - DNA, 19 bp, synthetic construct
  source 1..19: mol_type = other DNA
  misc_feature 1..2: note = RNA
  misc_feature 3..5: note = DNA
  misc_feature 6..8: note = RNA
  misc_feature 9..10: note = DNA
  misc_feature 11: note = RNA
  misc_feature 12: note = DNA
  misc_feature 13..14: note = RNA
  misc_feature 15: note = DNA
  misc_feature 16: note = RNA
  misc_feature 17..18: note = DNA
  misc_feature 19: note = RNA
aatttgagttatagtattc

SEQ ID NO: 712 - DNA, 19 bp, synthetic construct
  source 1..19: mol_type = other DNA
  misc_feature 1..2: note = RNA
  misc_feature 3: note = DNA
  misc_feature 4: note = RNA
  misc_feature 5: note = DNA
  misc_feature 6..10: note = RNA
  misc_feature 11..12: note = DNA
  misc_feature 13: note = RNA
  misc_feature 14: note = DNA
  misc_feature 15..19: note = RNA
gatctagaggttgtagcag

SEQ ID NO: 713 - DNA, 19 bp, synthetic construct
  source 1..19: mol_type = other DNA
  misc_feature 1..8: note = RNA
  misc_feature 9..10: note = DNA
  misc_feature 11..12: note = RNA
  misc_feature 13: note = DNA
  misc_feature 14..16: note = RNA
  misc_feature 17: note = DNA
  misc_feature 18..19: note = RNA
gacagaaattgataaatag

SEQ ID NO: 714 - DNA, 19 bp, synthetic construct
  source 1..19: mol_type = other DNA
  misc_feature 1: note = RNA
  misc_feature 2: note = DNA
  misc_feature 3: note = RNA
  misc_feature 4..5: note = DNA
  misc_feature 6..7: note = RNA
  misc_feature 8: note = DNA
  misc_feature 9..12: note = RNA
  misc_feature 13: note = DNA
  misc_feature 14: note = RNA
  misc_feature 15: note = DNA
  misc_feature 16: note = RNA
  misc_feature 17..18: note = DNA
  misc_feature 19: note = RNA
atattagtaacatgtcttc

SEQ ID NO: 715 - DNA, 19 bp, synthetic construct
  source 1..19: mol_type = other DNA
  misc_feature 1: note = DNA
  misc_feature 2..3: note = RNA
  misc_feature 4..5: note = DNA
  misc_feature 6..7: note = RNA
  misc_feature 8: note = DNA
  misc_feature 9: note = RNA
  misc_feature 10..12: note = DNA
  misc_feature 13..19: note = RNA
tagttaatatttggagaga

SEQ ID NO: 716 - DNA, 19 bp, synthetic construct
  source 1..19: mol_type = other DNA
  misc_feature 1..3: note = RNA
  misc_feature 4: note = DNA
  misc_feature 5: note = RNA
  misc_feature 6: note = DNA
  misc_feature 7..11: note = RNA
  misc_feature 12..13: note = DNA
  misc_feature 14: note = RNA
  misc_feature 15: note = DNA
  misc_feature 16..19: note = RNA
agatctagaggttgtagca

SEQ ID NO: 717 - DNA, 19 bp, synthetic construct
  source 1..19: mol_type = other DNA
  misc_feature 1: note = RNA
  misc_feature 2: note = DNA
  misc_feature 3: note = RNA
  misc_feature 4..5: note = DNA
  misc_feature 6..9: note = RNA
  misc_feature 10..12: note = DNA
  misc_feature 13: note = RNA
  misc_feature 14: note = DNA
  misc_feature 15..17: note = RNA
  misc_feature 18: note = DNA
  misc_feature 19: note = RNA
gtattggactttctccatg

SEQ ID NO: 718 - DNA, 19 bp, synthetic construct
  source 1..19: mol_type = other DNA
  misc_feature 1..3: note = RNA
  misc_feature 4: note = DNA
  misc_feature 5: note = RNA
  misc_feature 6: note = DNA
  misc_feature 7..9: note = RNA
  misc_feature 10..11: note = DNA
  misc_feature 12: note = RNA
  misc_feature 13: note = DNA
  misc_feature 14..15: note = RNA
  misc_feature 16: note = DNA
  misc_feature 17..18: note = RNA
  misc_feature 19: note = DNA
gaatgtagattctgatagt

SEQ ID NO: 719 - DNA, 19 bp, synthetic construct
  source 1..19: mol_type = other DNA
  misc_feature 1: note = DNA
  misc_feature 2: note = RNA
  misc_feature 3..4: note = DNA
  misc_feature 5..8: note = RNA
  misc_feature 9..11: note = DNA
  misc_feature 12: note = RNA
  misc_feature 13: note = DNA
  misc_feature 14..16: note = RNA
  misc_feature 17: note = DNA
  misc_feature 18..19: note = RNA
tattggactttctccatga

SEQ ID NO: 720 - RNA, 19 nt, synthetic construct
  source 1..19: mol_type = other RNA
tgctgagcgagtgaggtat

SEQ ID NO: 721 - RNA, 19 nt, synthetic construct
  source 1..19: mol_type = other RNA
tagctgagcgagtgaggta

SEQ ID NO: 722 - RNA, 19 nt, synthetic construct
  source 1..19: mol_type = other RNA
ttagctgagcgagtgaggt

SEQ ID NO: 723 - RNA, 19 nt, synthetic construct
  source 1..19: mol_type = other RNA
tgcttgttgaggcatttca

SEQ ID NO: 724 - RNA, 19 nt, synthetic construct
  source 1..19: mol_type = other RNA
ttgcttgttgaggcatttc

SEQ ID NO: 725 - RNA, 19 nt, synthetic construct
  source 1..19: mol_type = other RNA
tgtgcttgttgaggcattt

SEQ ID NO: 726 - RNA, 19 nt, synthetic construct
  source 1..19: mol_type = other RNA
tcgtgcttgttgaggcatt

SEQ ID NO: 727 - RNA, 19 nt, synthetic construct
  source 1..19: mol_type = other RNA
tacgtgcttgttgaggcat

SEQ ID NO: 728 - RNA, 19 nt, synthetic construct
  source 1..19: mol_type = other RNA
tgacgtgcttgttgaggca

SEQ ID NO: 729 - RNA, 19 nt, synthetic construct
  source 1..19: mol_type = other RNA
tttgtgagccatgttgagg

SEQ ID NO: 730 - RNA, 19 nt, synthetic construct
  source 1..19: mol_type = other RNA
ttttgtgagccatgttgag

SEQ ID NO: 731 - RNA, 19 nt, synthetic construct
  source 1..19: mol_type = other RNA
tatttgtgagccatgttga

SEQ ID NO: 732 - RNA, 19 nt, synthetic construct
  source 1..19: mol_type = other RNA
taatttgtgagccatgttg

SEQ ID NO: 733 - RNA, 19 nt, synthetic construct
  source 1..19: mol_type = other RNA
tcgagtgaggtattggact

SEQ ID NO: 734 - RNA, 19 nt, synthetic construct
  source 1..19: mol_type = other RNA
tgcgagtgaggtattggac

SEQ ID NO: 735 - RNA, 19 nt, synthetic construct
  source 1..19: mol_type = other RNA
tgagcgagtgaggtattgg

SEQ ID NO: 736 - RNA, 19 nt, synthetic construct
  source 1..19: mol_type = other RNA
ttgagcgagtgaggtattg

SEQ ID NO: 737 - RNA, 19 nt, synthetic construct
  source 1..19: mol_type = other RNA
taggctcttcttatagctg

SEQ ID NO: 738 - RNA, 19 nt, synthetic construct
  source 1..19: mol_type = other RNA
tatggttgaggctcttctt

SEQ ID NO: 739 - RNA, 19 nt, synthetic construct
  source 1..19: mol_type = other RNA
tacatattaagatgagaca

SEQ ID NO: 740 - RNA, 19 nt, synthetic construct
  source 1..19: mol_type = other RNA
tgacatattaagatgagac

SEQ ID NO: 741 - RNA, 19 nt, synthetic construct
  source 1..19: mol_type = other RNA
tagacatattaagatgaga

SEQ ID NO: 742 - RNA, 19 nt, synthetic construct
  source 1..19: mol_type = other RNA
tgagacatattaagatgag

SEQ ID NO: 743 - RNA, 19 nt, synthetic construct
  source 1..19: mol_type = other RNA
tcaagagacatattaagat

SEQ ID NO: 744 - RNA, 19 nt, synthetic construct
  source 1..19: mol_type = other RNA
tgcaagagacatattaaga

SEQ ID NO: 745 - RNA, 19 nt, synthetic construct
  source 1..19: mol_type = other RNA
tagcaagagacatattaag

SEQ ID NO: 746 - RNA, 19 nt, synthetic construct
  source 1..19: mol_type = other RNA
tcagcaagagacatattaa

SEQ ID NO: 747 - RNA, 19 nt, synthetic construct
  source 1..19: mol_type = other RNA
ttcagcaagagacatatta

SEQ ID NO: 748 - RNA, 19 nt, synthetic construct
  source 1..19: mol_type = other RNA
tatcagcaagagacatatt

SEQ ID NO: 749 - RNA, 19 nt, synthetic construct
  source 1..19: mol_type = other RNA
tgatcagcaagagacatat

SEQ ID NO: 750 - RNA, 19 nt, synthetic construct
  source 1..19: mol_type = other RNA
tcagatcagcaagagacat

SEQ ID NO: 751 - RNA, 19 nt, synthetic construct
  source 1..19: mol_type = other RNA
tacagatcagcaagagaca

SEQ ID NO: 752 - RNA, 19 nt, synthetic construct
  source 1..19: mol_type = other RNA
tgatgatacagatcagcaa

SEQ ID NO: 753 - RNA, 19 nt, synthetic construct
  source 1..19: mol_type = other RNA
tcgatgatacagatcagca

SEQ ID NO: 754 - RNA, 19 nt, synthetic construct
  source 1..19: mol_type = other RNA
tacgatgatacagatcagc

SEQ ID NO: 755 - RNA, 19 nt, synthetic construct
  source 1..19: mol_type = other RNA
tcacgatgatacagatcag

SEQ ID NO: 756 - RNA, 19 nt, synthetic construct
  source 1..19: mol_type = other RNA
ttcacgatgatacagatca

SEQ ID NO: 757 - RNA, 19 nt, synthetic construct
  source 1..19: mol_type = other RNA
tatcacgatgatacagatc

SEQ ID NO: 758 - RNA, 19 nt, synthetic construct
  source 1..19: mol_type = other RNA
tcatcacgatgatacagat

SEQ ID NO: 759 - RNA, 19 nt, synthetic construct
  source 1..19: mol_type = other RNA
tgcatcacgatgatacaga

SEQ ID NO: 760 - RNA, 19 nt, synthetic construct
  source 1..19: mol_type = other RNA
tgaagcatcacgatgatac

SEQ ID NO: 761 - RNA, 19 nt, synthetic construct
  source 1..19: mol_type = other RNA
tagagaagcatcacgatga

SEQ ID NO: 762 - RNA, 19 nt, synthetic construct
  source 1..19: mol_type = other RNA
tcagagaagcatcacgatg

SEQ ID NO: 763 - RNA, 19 nt, synthetic construct
  source 1..19: mol_type = other RNA
ttcagagaagcatcacgat

SEQ ID NO: 764 - RNA, 19 nt, synthetic construct
  source 1..19: mol_type = other RNA
tttcagagaagcatcacga

SEQ ID NO: 765 - RNA, 19 nt, synthetic construct
  source 1..19: mol_type = other RNA
tcttcagagaagcatcacg

SEQ ID NO: 766 - RNA, 19 nt, synthetic construct
  source 1..19: mol_type = other RNA
tttgtagcagaacttcaga

SEQ ID NO: 767 - RNA, 19 nt, synthetic construct
  source 1..19: mol_type = other RNA
tgttgtagcagaacttcag

SEQ ID NO: 768 - RNA, 19 nt, synthetic construct
  source 1..19: mol_type = other RNA
tggttgtagcagaacttca

SEQ ID NO: 769 - RNA, 19 nt, synthetic construct
  source 1..19: mol_type = other RNA
tctagaggttgtagcagaa

SEQ ID NO: 770 - RNA, 19 nt, synthetic construct
  source 1..19: mol_type = other RNA
tagatctagaggttgtagc

SEQ ID NO: 771 - RNA, 19 nt, synthetic construct
  source 1..19: mol_type = other RNA
tgcatgggatgacagattt

SEQ ID NO: 772 - RNA, 19 nt, synthetic construct
  source 1..19: mol_type = other RNA
ttgcatgggatgacagatt

SEQ ID NO: 773 - RNA, 19 nt, synthetic construct
  source 1..19: mol_type = other RNA
tgaaactcttctactcagg

SEQ ID NO: 774 - RNA, 19 nt, synthetic construct
  source 1..19: mol_type = other RNA
tatcttgaccttttcacaa

SEQ ID NO: 775 - RNA, 19 nt, synthetic construct
  source 1..19: mol_type = other RNA
taatcttgaccttttcaca

SEQ ID NO: 776 - RNA, 19 nt, synthetic construct
  source 1..19: mol_type = other RNA
ttcttaatcttgacctttt

SEQ ID NO: 777 - RNA, 19 nt, synthetic construct
  source 1..19: mol_type = other RNA
ttagtcttaatcttgacct

SEQ ID NO: 778 - RNA, 19 nt, synthetic construct
  source 1..19: mol_type = other RNA
ttttagtcttaatcttgac

SEQ ID NO: 779 - RNA, 19 nt, synthetic construct
  source 1..19: mol_type = other RNA
tttttagtcttaatcttga

SEQ ID NO: 780 - RNA, 19 nt, synthetic construct
  source 1..19: mol_type = other RNA
tgttttagtcttaatcttg

SEQ ID NO: 781 - RNA, 19 nt, synthetic construct
  source 1..19: mol_type = other RNA
tagttttagtcttaatctt

SEQ ID NO: 782 - RNA, 19 nt, synthetic construct
  source 1..19: mol_type = other RNA
tatatatgaagtgaacttg

SEQ ID NO: 783 - RNA, 19 nt, synthetic construct
  source 1..19: mol_type = other RNA
ttatatatgaagtgaactt

SEQ ID NO: 784 - RNA, 19 nt, synthetic construct
  source 1..19: mol_type = other RNA
ttattcacctcaaaagagt

SEQ ID NO: 785 - RNA, 19 nt, synthetic construct
  source 1..19: mol_type = other RNA
tatattcacctcaaaagag

SEQ ID NO: 786 - RNA, 19 nt, synthetic construct
  source 1..19: mol_type = other RNA
ttatattcacctcaaaaga

SEQ ID NO: 787 - RNA, 19 nt, synthetic construct
  source 1..19: mol_type = other RNA
ttactttgatacttggtga

SEQ ID NO: 788 - RNA, 19 nt, synthetic construct
  source 1..19: mol_type = other RNA
tattactttgatacttggt

SEQ ID NO: 789 - RNA, 19 nt, synthetic construct
  source 1..19: mol_type = other RNA
ttattactttgatacttgg

SEQ ID NO: 790 - RNA, 19 nt, synthetic construct
  source 1..19: mol_type = other RNA
tataatgacacttcatttg

SEQ ID NO: 791 - RNA, 19 nt, synthetic construct
  source 1..19: mol_type = other RNA
taataatgacacttcattt

SEQ ID NO: 792 - RNA, 19 nt, synthetic construct
  source 1..19: mol_type = other RNA
tgaataatgacacttcatt

SEQ ID NO: 793 - RNA, 19 nt, synthetic construct
  source 1..19: mol_type = other RNA
tctgtagcttttgacgtgc

SEQ ID NO: 794 - RNA, 19 nt, synthetic construct
  source 1..19: mol_type = other RNA
tttacaagatccaacagat

SEQ ID NO: 795 - RNA, 19 nt, synthetic construct
  source 1..19: mol_type = other RNA
ttttacaagatccaacaga

SEQ ID NO: 796 - RNA, 19 nt, synthetic construct
  source 1..19: mol_type = other RNA
tgtttacaagatccaacag

SEQ ID NO: 797 - RNA, 19 nt, synthetic construct
  source 1..19: mol_type = other RNA
ttgtttacaagatccaaca

SEQ ID NO: 798 - RNA, 19 nt, synthetic construct
  source 1..19: mol_type = other RNA
tatgtttacaagatccaac

SEQ ID NO: 799 - RNA, 19 nt, synthetic construct
  source 1..19: mol_type = other RNA
ttgaggaaatcaacagttg

SEQ ID NO: 800 - RNA, 19 nt, synthetic construct
  source 1..19: mol_type = other RNA
taaatttgtgagccatgtt

SEQ ID NO: 801 - RNA, 19 nt, synthetic construct
  source 1..19: mol_type = other RNA
ttgggatagaaatttgtga

SEQ ID NO: 802 - RNA, 19 nt, synthetic construct
  source 1..19: mol_type = other RNA
tagatttgggatagaaatt

SEQ ID NO: 803 - RNA, 19 nt, synthetic construct
  source 1..19: mol_type = other RNA
taagatttgggatagaaat

SEQ ID NO: 804 - RNA, 19 nt, synthetic construct
  source 1..19: mol_type = other RNA
tttatattcacctcaaaag

SEQ ID NO: 805 - RNA, 19 nt, synthetic construct
  source 1..19: mol_type = other RNA
tcttggtgaagacctgaaa

SEQ ID NO: 806 - RNA, 19 nt, synthetic construct
  source 1..19: mol_type = other RNA
tacttggtgaagacctgaa

SEQ ID NO: 807 - RNA, 19 nt, synthetic construct
  source 1..19: mol_type = other RNA
ttacttggtgaagacctga

SEQ ID NO: 808 - RNA, 19 nt, synthetic construct
  source 1..19: mol_type = other RNA
tatacttggtgaagacctg

SEQ ID NO: 809 - RNA, 19 nt, synthetic construct
  source 1..19: mol_type = other RNA
tgatacttggtgaagacct

SEQ ID NO: 810 - RNA, 19 nt, synthetic construct
  source 1..19: mol_type = other RNA
ttgaataatgacacttcat

SEQ ID NO: 811 - RNA, 19 nt, synthetic construct
  source 1..19: mol_type = other RNA
tagatgtgaggagtcagtg

SEQ ID NO: 812 - RNA, 19 nt, synthetic construct
  source 1..19: mol_type = other RNA
tgttaatgtggcatagaaa

SEQ ID NO: 813 - RNA, 19 nt, synthetic construct
  source 1..19: mol_type = other RNA
tattgtgttgtatgaagtc

SEQ ID NO: 814 - RNA, 19 nt, synthetic construct
  source 1..19: mol_type = other RNA
tagagtattgtgttgtatg

SEQ ID NO: 815 - RNA, 19 nt, synthetic construct
  source 1..19: mol_type = other RNA
ttagagtattgtgttgtat

SEQ ID NO: 816 - RNA, 19 nt, synthetic construct
  source 1..19: mol_type = other RNA
ttatgagataactgtcttc

SEQ ID NO: 817 - RNA, 19 nt, synthetic construct
  source 1..19: mol_type = other RNA
tatatgagataactgtctt

SEQ ID NO: 818 - RNA, 19 nt, synthetic construct
  source 1..19: mol_type = other RNA
tcaaatatgagataactgt

SEQ ID NO: 819 - RNA, 19 nt, synthetic construct
  source 1..19: mol_type = other RNA
tgccaaatatgagataact

SEQ ID NO: 820 - RNA, 19 nt, synthetic construct
  source 1..19: mol_type = other RNA
tgtattggactttctccat

SEQ ID NO: 821 - RNA, 19 nt, synthetic construct
  source 1..19: mol_type = other RNA
taatggttgaggctcttct

SEQ ID NO: 822 - RNA, 19 nt, synthetic construct
  source 1..19: mol_type = other RNA
tcaatggttgaggctcttc

SEQ ID NO: 823 - RNA, 19 nt, synthetic construct
  source 1..19: mol_type = other RNA
ttcaatggttgaggctctt

SEQ ID NO: 824 - RNA, 19 nt, synthetic construct
  source 1..19: mol_type = other RNA
tttcaatggttgaggctct

SEQ ID NO: 825 - RNA, 19 nt, synthetic construct
  source 1..19: mol_type = other RNA
tcatttcaatggttgaggc

SEQ ID NO: 826 - RNA, 19 nt, synthetic construct
  source 1..19: mol_type = other RNA
taggcatttcaatggttga

SEQ ID NO: 827 - RNA, 19 nt, synthetic construct
  source 1..19: mol_type = other RNA
tgttgaggcatttcaatgg

SEQ ID NO: 828 - RNA, 19 nt, synthetic construct
  source 1..19: mol_type = other RNA
tattaagatgagacagaaa

SEQ ID NO: 829 - RNA, 19 nt, synthetic construct
  source 1..19: mol_type = other RNA
tagagacatattaagatga

SEQ ID NO: 830 - RNA, 19 nt, synthetic construct
  source 1..19: mol_type = other RNA
taagagacatattaagatg

SEQ ID NO: 831 - RNA, 19 nt, synthetic construct
  source 1..19: mol_type = other RNA
ttacagatcagcaagagac

SEQ ID NO: 832 - RNA, 19 nt, synthetic construct
  source 1..19: mol_type = other RNA
tatacagatcagcaagaga

SEQ ID NO: 833 - RNA, 19 nt, synthetic construct
  source 1..19: mol_type = other RNA
tgatacagatcagcaagag

SEQ ID NO: 834 - RNA, 19 nt, synthetic construct
  source 1..19: mol_type = other RNA
ttgatacagatcagcaaga

SEQ ID NO: 835 - RNA, 19 nt, synthetic construct
  source 1..19: mol_type = other RNA
tatgatacagatcagcaag

SEQ ID NO: 836 - RNA, 19 nt, synthetic construct
  source 1..19: mol_type = other RNA
tgaacttcagagaagcatc

SEQ ID NO: 837 - RNA, 19 nt, synthetic construct
  source 1..19: mol_type = other RNA
tagaacttcagagaagcat

SEQ ID NO: 838 - RNA, 19 nt, synthetic construct
  source 1..19: mol_type = other RNA
tgtagcagaacttcagaga

SEQ ID NO: 839 - RNA, 19 nt, synthetic construct
  source 1..19: mol_type = other RNA
taggttgtagcagaacttc

SEQ ID NO: 840 - RNA, 19 nt, synthetic construct
  source 1..19: mol_type = other RNA
tgcagatctagaggttgta

SEQ ID NO: 841 - RNA, 19 nt, synthetic construct
  source 1..19: mol_type = other RNA
ttctgcatgggatgacaga

SEQ ID NO: 842 - RNA, 19 nt, synthetic construct
  source 1..19: mol_type = other RNA
ttcttctactcaggaagtg

SEQ ID NO: 843 - RNA, 19 nt, synthetic construct
  source 1..19: mol_type = other RNA
taaactcttctactcagga

SEQ ID NO: 844 - RNA, 19 nt, synthetic construct
  source 1..19: mol_type = other RNA
tagaaactcttctactcag

SEQ ID NO: 845 - RNA, 19 nt, synthetic construct
  source 1..19: mol_type = other RNA
tttagtcttaatcttgacc

SEQ ID NO: 846 - RNA, 19 nt, synthetic construct
  source 1..19: mol_type = other RNA
tttcatgtttacaagatcc

SEQ ID NO: 847 - RNA, 19 nt, synthetic construct
  source 1..19: mol_type = other RNA
tgttgaggaaatcaacagt

SEQ ID NO: 848 - RNA, 19 nt, synthetic construct
  source 1..19: mol_type = other RNA
tcatgttgaggaaatcaac

SEQ ID NO: 849 - RNA, 19 nt, synthetic construct
  source 1..19: mol_type = other RNA
tgccatgttgaggaaatca

SEQ ID NO: 850 - RNA, 19 nt, synthetic construct
  source 1..19: mol_type = other RNA
tagccatgttgaggaaatc

SEQ ID NO: 851 - RNA, 19 nt, synthetic construct
  source 1..19: mol_type = other RNA
tgagccatgttgaggaaat

SEQ ID NO: 852 - RNA, 19 nt, synthetic construct
  source 1..19: mol_type = other RNA
tgtgagccatgttgaggaa

SEQ ID NO: 853 - RNA, 19 nt, synthetic construct
  source 1..19: mol_type = other RNA
ttgtgagccatgttgagga

SEQ ID NO: 854 - RNA, 19 nt, synthetic construct
  source 1..19: mol_type = other RNA
taacttgttggcagtgcag

SEQ ID NO: 855 - RNA, 19 nt, synthetic construct
  source 1..19: mol_type = other RNA
tgaacttgttggcagtgca

SEQ ID NO: 856 - RNA, 19 nt, synthetic construct
  source 1..19: mol_type = other RNA
tgtgaacttgttggcagtg

SEQ ID NO: 857 - RNA, 19 nt, synthetic construct
  source 1..19: mol_type = other RNA
tagtgaacttgttggcagt

SEQ ID NO: 858 - RNA, 19 nt, synthetic construct
  source 1..19: mol_type = other RNA
taagtgaacttgttggcag

SEQ ID NO: 859 - RNA, 19 nt, synthetic construct
  source 1..19: mol_type = other RNA
tatgaagtgaacttgttgg

SEQ ID NO: 860 - RNA, 19 nt, synthetic construct
  source 1..19: mol_type = other RNA
ttatgaagtgaacttgttg

SEQ ID NO: 861 - RNA, 19 nt, synthetic construct
  source 1..19: mol_type = other RNA
tatatgaagtgaacttgtt

SEQ ID NO: 862 - RNA, 19 nt, synthetic construct
  source 1..19: mol_type = other RNA
ttatatgaagtgaacttgt

SEQ ID NO: 863 - RNA, 19 nt, synthetic construct
  source 1..19: mol_type = other RNA
tatgctttatatatgaagt

SEQ ID NO: 864 - RNA, 19 nt, synthetic construct
  source 1..19: mol_type = other RNA
tttgatacttggtgaagac

SEQ ID NO: 865 - RNA, 19 nt, synthetic construct
  source 1..19: mol_type = other RNA
ttttgatacttggtgaaga

SEQ ID NO: 866 - RNA, 19 nt, synthetic construct
  source 1..19: mol_type = other RNA
tctttgatacttggtgaag

SEQ ID NO: 867 - RNA, 19 nt, synthetic construct
  source 1..19: mol_type = other RNA
tactttgatacttggtgaa

SEQ ID NO: 868 - RNA, 19 nt, synthetic construct
  source 1..19: mol_type = other RNA
tttactttgatacttggtg

SEQ ID NO: 869 - RNA, 19 nt, synthetic construct
  source 1..19: mol_type = other RNA
tttattactttgatacttg

SEQ ID NO: 870 - RNA, 19 nt, synthetic construct
  source 1..19: mol_type = other RNA
tgttattactttgatactt

SEQ ID NO: 871 - RNA, 19 nt, synthetic construct
  source 1..19: mol_type = other RNA
ttgttattactttgatact

SEQ ID NO: 872 - RNA, 19 nt, synthetic construct
  source 1..19: mol_type = other RNA
tcacttcatttgtgttatt

SEQ ID NO: 873 - RNA, 19 nt, synthetic construct
  source 1..19: mol_type = other RNA
tgatgtgaggagtcagtgg

SEQ ID NO: 874 - RNA, 19 nt, synthetic construct
  source 1..19: mol_type = other RNA
ttaagataacagatgtgag

SEQ ID NO: 875 - RNA, 19 nt, synthetic construct
  source 1..19: mol_type = other RNA
tataagataacagatgtga

SEQ ID NO: 876 - RNA, 19 nt, synthetic construct
  source 1..19: mol_type = other RNA
taataagataacagatgtg

SEQ ID NO: 877 - RNA, 19 nt, synthetic construct
  source 1..19: mol_type = other RNA
tgttactacaaatagttct

SEQ ID NO: 878 - RNA, 19 nt, synthetic construct
  source 1..19: mol_type = other RNA
tagttactacaaatagttc

SEQ ID NO: 879 - RNA, 19 nt, synthetic construct
  source 1..19: mol_type = other RNA
tgatagttactacaaatag

SEQ ID NO: 880 - RNA, 19 nt, synthetic construct
  source 1..19: mol_type = other RNA
ttgatagttactacaaata

SEQ ID NO: 881 - RNA, 19 nt, synthetic construct
  source 1..19: mol_type = other RNA
tctgatagttactacaaat

SEQ ID NO: 882 - RNA, 19 nt, synthetic construct
  source 1..19: mol_type = other RNA
tgattctgatagttactac

SEQ ID NO: 883 - RNA, 19 nt, synthetic construct
  source 1..19: mol_type = other RNA
tagattctgatagttacta

SEQ ID NO: 884 - RNA, 19 nt, synthetic construct
  source 1..19: mol_type = other RNA
ttgtagattctgatagtta

SEQ ID NO: 885 - RNA, 19 nt, synthetic construct
  source 1..19: mol_type = other RNA
tgaatgtagattctgatag

SEQ ID NO: 886 - RNA, 19 nt, synthetic construct
  source 1..19: mol_type = other RNA
ttgattctcatcaacttta

SEQ ID NO: 887 - RNA, 19 nt, synthetic construct
  source 1..19: mol_type = other RNA
tttgattctcatcaacttt

SEQ ID NO: 888 - RNA, 19 nt, synthetic construct
  source 1..19: mol_type = other RNA
tcttgattctcatcaactt

SEQ ID NO: 889 - RNA, 19 nt, synthetic construct
  source 1..19: mol_type = other RNA
tacttgattctcatcaact

SEQ ID NO: 890 - RNA, 19 nt, synthetic construct
  source 1..19: mol_type = other RNA
ttaagagtatggccttact

SEQ ID NO: 891 - RNA, 19 nt, synthetic construct
  source 1..19: mol_type = other RNA
tgtaagagtatggccttac

SEQ ID NO: 892 - RNA, 19 nt, synthetic construct
  source 1..19: mol_type = other RNA
ttgtaagagtatggcctta

SEQ ID NO: 893 - RNA, 19 nt, synthetic construct
  source 1..19: mol_type = other RNA
tttatgtaagagtatggcc

SEQ ID NO: 894 - RNA, 19 nt, synthetic construct
  source 1..19: mol_type = other RNA
tattatgtaagagtatggc

SEQ ID NO: 895 - RNA, 19 nt, synthetic construct
  source 1..19: mol_type = other RNA
ttatgtcttagaacagatt

SEQ ID NO: 896 - RNA, 19 nt, synthetic construct
  source 1..19: mol_type = other RNA
tcatatgtcttagaacaga

SEQ ID NO: 897 - RNA, 19 nt, synthetic construct
  source 1..19: mol_type = other RNA
tgatcatatgtcttagaac

SEQ ID NO: 898 - RNA, 19 nt, synthetic construct
  source 1..19: mol_type = other RNA
ttgatcatatgtcttagaa

SEQ ID NO: 899 - RNA, 19 nt, synthetic construct
  source 1..19: mol_type = other RNA
tttgatcatatgtcttaga

SEQ ID NO: 900 - RNA, 19 nt, synthetic construct
  source 1..19: mol_type = other RNA
ttctgttgatcatatgtct

SEQ ID NO: 901 - RNA, 19 nt, synthetic construct
  source 1..19: mol_type = other RNA
tatctgttgatcatatgtc

SEQ ID NO: 902 - RNA, 19 nt, synthetic construct
  source 1..19: mol_type = other RNA
tcatctgttgatcatatgt

SEQ ID NO: 903 - RNA, 19 nt, synthetic construct
  source 1..19: mol_type = other RNA
ttctcatctgttgatcata

SEQ ID NO: 904 - RNA, 19 nt, synthetic construct
  source 1..19: mol_type = other RNA
tttctcatctgttgatcat

SEQ ID NO: 905 - RNA, 19 nt, synthetic construct
  source 1..19: mol_type = other RNA
ttatgactaatctcactgt

SEQ ID NO: 906 - RNA, 19 nt, synthetic construct
  source 1..19: mol_type = other RNA
tatatgactaatctcactg

SEQ ID NO: 907 - RNA, 19 nt, synthetic construct
  source 1..19: mol_type = other RNA
ttgatatgactaatctcac

SEQ ID NO: 908 - RNA, 19 nt, synthetic construct
  source 1..19: mol_type = other RNA
tagtatggtaagctaggta

SEQ ID NO: 909 - RNA, 19 nt, synthetic construct
  source 1..19: mol_type = other RNA
ttagtatggtaagctaggt

SEQ ID NO: 910 - RNA, 19 nt, synthetic construct
  source 1..19: mol_type = other RNA
tatagtatggtaagctagg

SEQ ID NO: 911 - RNA, 19 nt, synthetic construct
  source 1..19: mol_type = other RNA
ttatagtatggtaagctag

SEQ ID NO: 912 - RNA, 19 nt, synthetic construct
  source 1..19: mol_type = other RNA
tgatatagtatggtaagct

SEQ ID NO: 913 - RNA, 19 nt, synthetic construct
  source 1..19: mol_type = other RNA
tttaatatttggagagaga

SEQ ID NO: 914 - RNA, 19 nt, synthetic construct
  source 1..19: mol_type = other RNA
tatgggccaacaagttcat

SEQ ID NO: 915 - RNA, 19 nt, synthetic construct
  source 1..19: mol_type = other RNA
tgatgggccaacaagttca

SEQ ID NO: 916 - RNA, 19 nt, synthetic construct
  source 1..19: mol_type = other RNA
tagatgggccaacaagttc

SEQ ID NO: 917 - RNA, 19 nt, synthetic construct
  source 1..19: mol_type = other RNA
ttagatgggccaacaagtt

SEQ ID NO: 918 - RNA, 19 nt, synthetic construct
  source 1..19: mol_type = other RNA
taatagatgggccaacaag

SEQ ID NO: 919 - RNA, 19 nt, synthetic construct
  source 1..19: mol_type = other RNA
tgtaatagatgggccaaca

SEQ ID NO: 920 - RNA, 19 nt, synthetic construct
  source 1..19: mol_type = other RNA
ttagcatagctggatctat

SEQ ID NO: 921 - RNA, 19 nt, synthetic construct
  source 1..19: mol_type = other RNA
tatagcatagctggatcta

SEQ ID NO: 922 - RNA, 19 nt, synthetic construct
  source 1..19: mol_type = other RNA
taatagcatagctggatct

SEQ ID NO: 923 - RNA, 19 nt, synthetic construct
  source 1..19: mol_type = other RNA
ttattggaagatgttctga

SEQ ID NO: 924 - RNA, 19 nt, synthetic construct
  source 1..19: mol_type = other RNA
ttgagttattggaagatgt

SEQ ID NO: 925 - RNA, 19 nt, synthetic construct
  source 1..19: mol_type = other RNA
tattaccaaagtttggtga

SEQ ID NO: 926 - RNA, 19 nt, synthetic construct
  source 1..19: mol_type = other RNA
taattaccaaagtttggtg

SEQ ID NO: 927 - RNA, 19 nt, synthetic construct
  source 1..19: mol_type = other RNA
taacttaaattaccaaagt

SEQ ID NO: 928 - RNA, 19 nt, synthetic construct
  source 1..19: mol_type = other RNA
ttagtcaacttaaattacc

SEQ ID NO: 929 - RNA, 19 nt, synthetic construct
  source 1..19: mol_type = other RNA
tattatgcagtataggtgt

SEQ ID NO: 930 - RNA, 19 nt, synthetic construct
  source 1..19: mol_type = other RNA
tgattatgcagtataggtg

SEQ ID NO: 931 - RNA, 19 nt, synthetic construct
  source 1..19: mol_type = other RNA
tggattatgcagtataggt

SEQ ID NO: 932 - RNA, 19 nt, synthetic construct
  source 1..19: mol_type = other RNA
ttggattatgcagtatagg

SEQ ID NO: 933 - RNA, 19 nt, synthetic construct
  source 1..19: mol_type = other RNA
tgttggattatgcagtata

SEQ ID NO: 934 - RNA, 19 nt, synthetic construct
  source 1..19: mol_type = other RNA
ttgttggattatgcagtat

SEQ ID NO: 935 - RNA, 19 nt, synthetic construct
  source 1..19: mol_type = other RNA
tttgttggattatgcagta

SEQ ID NO: 936 - RNA, 19 nt, synthetic construct
  source 1..19: mol_type = other RNA
tattgttggattatgcagt

SEQ ID NO: 937 - RNA, 19 nt, synthetic construct
  source 1..19: mol_type = other RNA
tttagtaacatgtcttcaa

SEQ ID NO: 938 - RNA, 19 nt, synthetic construct
  source 1..19: mol_type = other RNA
tattagtaacatgtcttca

SEQ ID NO: 939 - RNA, 19 nt, synthetic construct
  source 1..19: mol_type = other RNA
tgttatattagtaacatgt

SEQ ID NO: 940 - RNA, 19 nt, synthetic construct
  source 1..19: mol_type = other RNA
tttacacatcctctactct

SEQ ID NO: 941 - RNA, 19 nt, synthetic construct
  source 1..19: mol_type = other RNA
tagatatggttaattacac

SEQ ID NO: 942 - RNA, 19 nt, synthetic construct
  source 1..19: mol_type = other RNA
tgaaaccaaggtcaatatt

SEQ ID NO: 943 - RNA, 19 nt, synthetic construct
  source 1..19: mol_type = other RNA
tagaaaccaaggtcaatat

SEQ ID NO: 944 - RNA, 19 nt, synthetic construct
  source 1..19: mol_type = other RNA
ttaagaaaccaaggtcaat

SEQ ID NO: 945 - RNA, 19 nt, synthetic construct
  source 1..19: mol_type = other RNA
ttgtgtaagaaaccaaggt

SEQ ID NO: 946 - RNA, 19 nt, synthetic construct
  source 1..19: mol_type = other RNA
tacacttgtgtaagaaacc

SEQ ID NO: 947 - RNA, 19 nt, synthetic construct
  source 1..19: mol_type = other RNA
tcaacacttgtgtaagaaa

SEQ ID NO: 948 - RNA, 19 nt, synthetic construct
  source 1..19: mol_type = other RNA
tagcaacacttgtgtaaga

SEQ ID NO: 949 - RNA, 19 nt, synthetic construct
  source 1..19: mol_type = other RNA
ttgagttagcaacacttgt

SEQ ID NO: 950 - RNA, 19 nt, synthetic construct
  source 1..19: mol_type = other RNA
ttattgagttagcaacact

SEQ ID NO: 951 - RNA, 19 nt, synthetic construct
  source 1..19: mol_type = other RNA
tctattgagttagcaacac

SEQ ID NO: 952 - RNA, 19 nt, synthetic construct
  source 1..19: mol_type = other RNA
tactattgagttagcaaca

SEQ ID NO: 953 - RNA, 19 nt, synthetic construct
  source 1..19: mol_type = other RNA
ttcactattgagttagcaa

SEQ ID NO: 954 - RNA, 19 nt, synthetic construct
  source 1..19: mol_type = other RNA
tttcactattgagttagca

SEQ ID NO: 955 - RNA, 19 nt, synthetic construct
  source 1..19: mol_type = other RNA
tctccttcactattgagtt

SEQ ID NO: 956 - RNA, 19 nt, synthetic construct
  source 1..19: mol_type = other RNA
tgtctccttcactattgag

SEQ ID NO: 957 - RNA, 19 nt, synthetic construct
  source 1..19: mol_type = other RNA
ttgaaccaaacactttcca

SEQ ID NO: 958 - RNA, 19 nt, synthetic construct
  source 1..19: mol_type = other RNA
tagatatccctgaaccaaa

SEQ ID NO: 959 - RNA, 19 nt, synthetic construct
  source 1..19: mol_type = other RNA
tcagatatccctgaaccaa

SEQ ID NO: 960 - RNA, 19 nt, synthetic construct
  source 1..19: mol_type = other RNA
tcacttaagaaatctctgc

SEQ ID NO: 961 - RNA, 19 nt, synthetic construct
  source 1..19: mol_type = other RNA
ttagatgaggcgtcactta

SEQ ID NO: 962 - RNA, 19 nt, synthetic construct
  source 1..19: mol_type = other RNA
ttgtagatgaggcgtcact

SEQ ID NO: 963 - RNA, 19 nt, synthetic construct
  source 1..19: mol_type = other RNA
tgcttgtagatgaggcgtc

SEQ ID NO: 964 - RNA, 19 nt, synthetic construct
  source 1..19: mol_type = other RNA
ttttccagcttgtagatga

SEQ ID NO: 965 - RNA, 19 nt, synthetic construct
  source 1..19: mol_type = other RNA
tattgtaacaaacagtgta

SEQ ID NO: 966 - RNA, 19 nt, synthetic construct
  source 1..19: mol_type = other RNA
tatcctcacagaataagat

SEQ ID NO: 967 - RNA, 19 nt, synthetic construct
  source 1..19: mol_type = other RNA
tgttatagtattctgtaat

SEQ ID NO: 968 - RNA, 19 nt, synthetic construct
  source 1..19: mol_type = other RNA
ttgagttatagtattctgt

SEQ ID NO: 969 - RNA, 19 nt, synthetic construct
  source 1..19: mol_type = other RNA
tatatagtgattctgattt

SEQ ID NO: 970 - RNA, 19 nt, synthetic construct
  source 1..19: mol_type = other RNA
tctggggagttttctgact

SEQ ID NO: 971 - RNA, 19 nt, synthetic construct
  source 1..19: mol_type = other RNA
tgctggggagttttctgac

SEQ ID NO: 972 - RNA, 19 nt, synthetic construct
  source 1..19: mol_type = other RNA
tagctggggagttttctga

SEQ ID NO: 973 - RNA, 19 nt, synthetic construct
  source 1..19: mol_type = other RNA
ttagctggggagttttctg

SEQ ID NO: 974 - RNA, 19 nt, synthetic construct
  source 1..19: mol_type = other RNA
tttagctggggagttttct

SEQ ID NO: 975 - RNA, 19 nt, synthetic construct
  source 1..19: mol_type = other RNA
ttgttgtatgaagtcttac

SEQ ID NO: 976 - RNA, 19 nt, synthetic construct
  source 1..19: mol_type = other RNA
ttgtgttgtatgaagtctt

SEQ ID NO: 977 - RNA, 19 nt, synthetic construct
  source 1..19: mol_type = other RNA
tttgtgttgtatgaagtct

SEQ ID NO: 978 - RNA, 19 nt, synthetic construct
  source 1..19: mol_type = other RNA
tttttaggtagccttggca

SEQ ID NO: 979 - RNA, 19 nt, synthetic construct
  source 1..19: mol_type = other RNA
tttcttttaggtagccttg

SEQ ID NO: 980 - RNA, 19 nt, synthetic construct
  source 1..19: mol_type = other RNA
tcttcttttaggtagcctt

SEQ ID NO: 981 - RNA, 19 nt, synthetic construct
  source 1..19: mol_type = other RNA
ttcttcttttaggtagcct

SEQ ID NO: 982 - RNA, 19 nt, synthetic construct
  source 1..19: mol_type = other RNA
tgtcttcttttaggtagcc

SEQ ID NO: 983 - RNA, 19 nt, synthetic construct
  source 1..19: mol_type = other RNA
ttgtcttcttttaggtagc

SEQ ID NO: 984 - RNA, 19 nt, synthetic construct
  source 1..19: mol_type = other RNA
tctgtcttcttttaggtag

SEQ ID NO: 985 - RNA, 19 nt, synthetic construct
  source 1..19: mol_type = other RNA
tactgtcttcttttaggta

SEQ ID NO: 986 - RNA, 19 nt, synthetic construct
  source 1..19: mol_type = other RNA
taactgtcttcttttaggt

SEQ ID NO: 987 - RNA, 19 nt, synthetic construct
  source 1..19: mol_type = other RNA
ttaactgtcttcttttagg

SEQ ID NO: 988 - RNA, 19 nt, synthetic construct
  source 1..19: mol_type = other RNA
tataactgtcttcttttag

SEQ ID NO: 989 - RNA, 19 nt, synthetic construct
  source 1..19: mol_type = other RNA
tgataactgtcttctttta

SEQ ID NO: 990 - RNA, 19 nt, synthetic construct
  source 1..19: mol_type = other RNA
tagataactgtcttctttt

SEQ ID NO: 991 - RNA, 19 nt, synthetic construct
  source 1..19: mol_type = other RNA
tgagataactgtcttcttt

SEQ ID NO: 992 - RNA, 19 nt, synthetic construct
  source 1..19: mol_type = other RNA
ttgagataactgtcttctt

SEQ ID NO: 993 - RNA, 19 nt, synthetic construct
  source 1..19: mol_type = other RNA
tatgagataactgtcttct

SEQ ID NO: 994 - RNA, 19 nt, synthetic construct
  source 1..19: mol_type = other RNA
taatatgagataactgtct

SEQ ID NO: 995 - RNA, 19 nt, synthetic construct
  source 1..19: mol_type = other RNA
taaatatgagataactgtc

SEQ ID NO: 996 - RNA, 19 nt, synthetic construct
  source 1..19: mol_type = other RNA
tccaaatatgagataactg

SEQ ID NO: 997 - RNA, 19 nt, synthetic construct
  source 1..19: mol_type = other RNA
tgaagtctgaagttttaag

SEQ ID NO: 998 - RNA, 19 nt, synthetic construct
  source 1..19: mol_type = other RNA
taggaagtctgaagtttta

SEQ ID NO: 999 - RNA, 19 nt, synthetic construct
  source 1..19: mol_type = other RNA
tccatgataccagcaggac

SEQ ID NO: 1000 - RNA, 19 nt, synthetic construct
  source 1..19: mol_type = other RNA
ttccatgataccagcagga

SEQ ID NO: 1001 - RNA, 19 nt, synthetic construct
  source 1..19: mol_type = other RNA
tctccatgataccagcagg

SEQ ID NO: 1002 - RNA, 19 nt, synthetic construct
  source 1..19: mol_type = other RNA
ttctccatgataccagcag

SEQ ID NO: 1003 - RNA, 19 nt, synthetic construct
  source 1..19: mol_type = other RNA
tttctccatgataccagca

SEQ ID NO: 1004 - RNA, 19 nt, synthetic construct
  source 1..19: mol_type = other RNA
ttttctccatgataccagc

SEQ ID NO: 1005 - RNA, 19 nt, synthetic construct
  source 1..19: mol_type = other RNA
tctttctccatgataccag

SEQ ID NO: 1006 - RNA, 19 nt, synthetic construct
  source 1..19: mol_type = other RNA
tactttctccatgatacca

SEQ ID NO: 1007 - RNA, 19 nt, synthetic construct
  source 1..19: mol_type = other RNA
tgactttctccatgatacc

SEQ ID NO: 1008 - RNA, 19 nt, synthetic construct
  source 1..19: mol_type = other RNA
taggtattggactttctcc

SEQ ID NO: 1009 - RNA, 19 nt, synthetic construct
  source 1..19: mol_type = other RNA
tgaggtattggactttctc

SEQ ID NO: 1010 - RNA, 19 nt, synthetic construct
  source 1..19: mol_type = other RNA
tgtgaggtattggactttc

SEQ ID NO: 1011 - RNA, 19 nt, synthetic construct
  source 1..19: mol_type = other RNA
tagtgaggtattggacttt

SEQ ID NO: 1012 - RNA, 19 nt, synthetic construct
  source 1..19: mol_type = other RNA
tagcgagtgaggtattgga

SEQ ID NO: 1013 - RNA, 19 nt, synthetic construct
  source 1..19: mol_type = other RNA
tatagctgagcgagtgagg

SEQ ID NO: 1014 - RNA, 19 nt, synthetic construct
  source 1..19: mol_type = other RNA
ttatagctgagcgagtgag

SEQ ID NO: 1015 - RNA, 19 nt, synthetic construct
  source 1..19: mol_type = other RNA
tttatagctgagcgagtga

SEQ ID NO: 1016 - RNA, 19 nt, synthetic construct
  source 1..19: mol_type = other RNA
tcttatagctgagcgagtg

SEQ ID NO: 1017 - RNA, 19 nt, synthetic construct
  source 1..19: mol_type = other RNA
tttcttatagctgagcgag

SEQ ID NO: 1018 - RNA, 19 nt, synthetic construct
  source 1..19: mol_type = other RNA
tgctcttcttatagctgag

SEQ ID NO: 1019 - RNA, 19 nt, synthetic construct
  source 1..19: mol_type = other RNA
tggctcttcttatagctga

SEQ ID NO: 1020 - RNA, 19 nt, synthetic construct
  source 1..19: mol_type = other RNA
tgaggctcttcttatagct

SEQ ID NO: 1021 - RNA, 19 nt, synthetic construct
  source 1..19: mol_type = other RNA
ttggttgaggctcttctta

SEQ ID NO: 1022 - RNA, 19 nt, synthetic construct
  source 1..19: mol_type = other RNA
ttgacgtgcttgttgaggc

SEQ ID NO: 1023 - RNA, 19 nt, synthetic construct
  source 1..19: mol_type = other RNA
tttgacgtgcttgttgagg

SEQ ID NO: 1024 - RNA, 19 nt, synthetic construct
  source 1..19: mol_type = other RNA
ttttgacgtgcttgttgag

SEQ ID NO: 1025 - RNA, 19 nt, synthetic construct
  source 1..19: mol_type = other RNA
tttttgacgtgcttgttga

SEQ ID NO: 1026 - RNA, 19 nt, synthetic construct
  source 1..19: mol_type = other RNA
tatgagacagaaattgata

SEQ ID NO: 1027 - RNA, 19 nt, synthetic construct
  source 1..19: mol_type = other RNA
tgatgagacagaaattgat

SEQ ID NO: 1028 - RNA, 19 nt, synthetic construct
  source 1..19: mol_type = other RNA
tagatgagacagaaattga

SEQ ID NO: 1029 - RNA, 19 nt, synthetic construct
  source 1..19: mol_type = other RNA
taagatgagacagaaattg

SEQ ID NO: 1030 - RNA, 19 nt, synthetic construct
  source 1..19: mol_type = other RNA
ttattaagatgagacagaa

SEQ ID NO: 1031 - RNA, 19 nt, synthetic construct
  source 1..19: mol_type = other RNA
tatattaagatgagacaga

SEQ ID NO: 1032 - RNA, 19 nt, synthetic construct
  source 1..19: mol_type = other RNA
tcatattaagatgagacag

SEQ ID NO: 1033 - RNA, 19 nt, synthetic construct
  source 1..19: mol_type = other RNA
tagatcagcaagagacata

SEQ ID NO: 1034 - RNA, 19 nt, synthetic construct
  source 1..19: mol_type = other RNA
ttagcagaacttcagagaa

SEQ ID NO: 1035 - RNA, 19 nt, synthetic construct
  source 1..19: mol_type = other RNA
ttgtagcagaacttcagag

SEQ ID NO: 1036 - RNA, 19 nt, synthetic construct
  source 1..19: mol_type = other RNA
tgaggttgtagcagaactt

SEQ ID NO: 1037 - RNA, 19 nt, synthetic construct
  source 1..19: mol_type = other RNA
tagaggttgtagcagaact

SEQ ID NO: 1038 - RNA, 19 nt, synthetic construct
  source 1..19: mol_type = other RNA
ttagaggttgtagcagaac

SEQ ID NO: 1039 - RNA, 19 nt, synthetic construct
  source 1..19: mol_type = other RNA
ttctagaggttgtagcaga

SEQ ID NO: 1040 - RNA, 19 nt, synthetic construct
  source 1..19: mol_type = other RNA
tcagatctagaggttgtag

SEQ ID NO: 1041 - RNA, 19 nt, synthetic construct
  source 1..19: mol_type = other RNA
ttgcagatctagaggttgt

SEQ ID NO: 1042 - RNA, 19 nt, synthetic construct
  source 1..19: mol_type = other RNA
ttaagctgatgtggcaagc

SEQ ID NO: 1043 - RNA, 19 nt, synthetic construct
  source 1..19: mol_type = other RNA
tttaagctgatgtggcaag

SEQ ID NO: 1044 - RNA, 19 nt, synthetic construct
  source 1..19: mol_type = other RNA
ttttaagctgatgtggcaa

SEQ ID NO: 1045 - RNA, 19 nt, synthetic construct
  source 1..19: mol_type = other RNA
tagattttaagctgatgtg

SEQ ID NO: 1046 - RNA, 19 nt, synthetic construct
  source 1..19: mol_type = other RNA
tcagattttaagctgatgt

SEQ ID NO: 1047 - RNA, 19 nt, synthetic construct
  source 1..19: mol_type = other RNA
tacagattttaagctgatg

SEQ ID NO: 1048 - RNA, 19 nt, synthetic construct
  source 1..19: mol_type = other RNA
tgacagattttaagctgat

SEQ ID NO: 1049 - RNA, 19 nt, synthetic construct
  source 1..19: mol_type = other RNA
ttgacagattttaagctga

SEQ ID NO: 1050 - RNA, 19 nt, synthetic construct
  source 1..19: mol_type = other RNA
tatgacagattttaagctg

SEQ ID NO: 1051 - RNA, 19 nt, synthetic construct
  source 1..19: mol_type = other RNA
tgatgacagattttaagct

SEQ ID NO: 1052 - RNA, 19 nt, synthetic construct
  source 1..19: mol_type = other RNA
tggatgacagattttaagc

SEQ ID NO: 1053 - RNA, 19 nt, synthetic construct
  source 1..19: mol_type = other RNA
ttcaggaagtggtctgtta

SEQ ID NO: 1054 - RNA, 19 nt, synthetic construct
  source 1..19: mol_type = other RNA
tactcaggaagtggtctgt

SEQ ID NO: 1055 - RNA, 19 nt, synthetic construct
  source 1..19: mol_type = other RNA
ttactcaggaagtggtctg

SEQ ID NO: 1056 - RNA, 19 nt, synthetic construct
  source 1..19: mol_type = other RNA
tctactcaggaagtggtct

SEQ ID NO: 1057 - RNA, 19 nt, synthetic construct
  source 1..19: mol_type = other RNA
ttctactcaggaagtggtc

SEQ ID NO: 1058 - RNA, 19 nt, synthetic construct
  source 1..19: mol_type = other RNA
taactcttctactcaggaa

SEQ ID NO: 1059 - RNA, 19 nt, synthetic construct
  source 1..19: mol_type = other RNA
ttcttgaccttttcacaaa

SEQ ID NO: 1060 - RNA, 19 nt, synthetic construct
  source 1..19: mol_type = other RNA
ttaatcttgaccttttcac

SEQ ID NO: 1061 - RNA, 19 nt, synthetic construct
  source 1..19: mol_type = other RNA
tttaatcttgaccttttca

SEQ ID NO: 1062 - RNA, 19 nt, synthetic construct
  source 1..19: mol_type = other RNA
tcttaatcttgaccttttc

SEQ ID NO: 1063 - RNA, 19 nt, synthetic construct
  source 1..19: mol_type = other RNA
tcatgtttacaagatccaa

SEQ ID NO: 1064 - RNA, 19 nt, synthetic construct
  source 1..19: mol_type = other RNA
ttcatgtttacaagatcca

SEQ ID NO: 1065 - RNA, 19 nt, synthetic construct
  source 1..19: mol_type = other RNA
tcttttcatgtttacaaga

SEQ ID NO: 1066 - RNA, 19 nt, synthetic construct
  source 1..19: mol_type = other RNA
tccttttcatgtttacaag

SEQ ID NO: 1067 - RNA, 19 nt, synthetic construct
  source 1..19: mol_type = other RNA
tcccttttcatgtttacaa

SEQ ID NO: 1068 - RNA, 19 nt, synthetic construct
  source 1..19: mol_type = other RNA
taaagcccttttcatgttt

SEQ ID NO: 1069 - RNA, 19 nt, synthetic construct
  source 1..19: mol_type = other RNA
ttaaagcccttttcatgtt

SEQ ID NO: 1070 - RNA, 19 nt, synthetic construct
  source 1..19: mol_type = other RNA
tagaaaagatttgggatag

SEQ ID NO: 1071 - RNA, 19 nt, synthetic construct
  source 1..19: mol_type = other RNA
ttcagaaaagatttgggat

SEQ ID NO: 1072 - RNA, 19 nt, synthetic construct
  source 1..19: mol_type = other RNA
tttcagaaaagatttggga

SEQ ID NO: 1073 - RNA, 19 nt, synthetic construct
  source 1..19: mol_type = other RNA
ttcttcatcttcagaaaag

SEQ ID NO: 1074 - RNA, 19 nt, synthetic construct
  source 1..19: mol_type = other RNA
tctcttcatcttcagaaaa

SEQ ID NO: 1075 - RNA, 19 nt, synthetic construct
  source 1..19: mol_type = other RNA
tactcttcatcttcagaaa

SEQ ID NO: 1076 - RNA, 19 nt, synthetic construct
  source 1..19: mol_type = other RNA
taactcttcatcttcagaa

SEQ ID NO: 1077 - RNA, 19 nt, synthetic construct
  source 1..19: mol_type = other RNA
taaactcttcatcttcaga

SEQ ID NO: 1078 - RNA, 19 nt, synthetic construct
  source 1..19: mol_type = other RNA
ttaaactcttcatcttcag

SEQ ID NO: 1079 - RNA, 19 nt, synthetic construct
  source 1..19: mol_type = other RNA
tctaaactcttcatcttca

SEQ ID NO: 1080 - RNA, 19 nt, synthetic construct
  source 1..19: mol_type = other RNA
tactaaactcttcatcttc

SEQ ID NO: 1081 - RNA, 19 nt, synthetic construct
  source 1..19: mol_type = other RNA
tacttgttggcagtgcagt

SEQ ID NO: 1082 - RNA, 19 nt, synthetic construct
  source 1..19: mol_type = other RNA
ttgaacttgttggcagtgc

SEQ ID NO: 1083 - RNA, 19 nt, synthetic construct
  source 1..19: mol_type = other RNA
tgaagtgaacttgttggca

SEQ ID NO: 1084 - RNA, 19 nt, synthetic construct
  source 1..19: mol_type = other RNA
tctttatatatgaagtgaa

SEQ ID NO: 1085 - RNA, 19 nt, synthetic construct
  source 1..19: mol_type = other RNA
tgctttatatatgaagtga

SEQ ID NO: 1086 - RNA, 19 nt, synthetic construct
  source 1..19: mol_type = other RNA
ttgctttatatatgaagtg

SEQ ID NO: 1087 - RNA, 19 nt, synthetic construct
  source 1..19: mol_type = other RNA
tcacctcaaaagagtaaaa

SEQ ID NO: 1088 - RNA, 19 nt, synthetic construct
  source 1..19: mol_type = other RNA
ttcacctcaaaagagtaaa

SEQ ID NO: 1089 - RNA, 19 nt, synthetic construct
  source 1..19: mol_type = other RNA
tttcacctcaaaagagtaa

SEQ ID NO: 1090 - RNA, 19 nt, synthetic construct
  source 1..19: mol_type = other RNA
tattcacctcaaaagagta

SEQ ID NO: 1091 - RNA, 19 nt, synthetic construct
  source 1..19: mol_type = other RNA
ttgatacttggtgaagacc

SEQ ID NO: 1092 - RNA, 19 nt, synthetic construct
  source 1..19: mol_type = other RNA
tgtgttattactttgatac

SEQ ID NO: 1093 - RNA, 19 nt, synthetic construct
  source 1..19: mol_type = other RNA
tatttgtgttattactttg

SEQ ID NO: 1094 - RNA, 19 nt, synthetic construct
  source 1..19: mol_type = other RNA
tttcatttgtgttattact

SEQ ID NO: 1095 - RNA, 19 nt, synthetic construct
  source 1..19: mol_type = other RNA
taacagatgtgaggagtca

SEQ ID NO: 1096 - RNA, 19 nt, synthetic construct
  source 1..19: mol_type = other RNA
tataacagatgtgaggagt

SEQ ID NO: 1097 - RNA, 19 nt, synthetic construct
  source 1..19: mol_type = other RNA
tgataacagatgtgaggag

SEQ ID NO: 1098 - RNA, 19 nt, synthetic construct
  source 1..19: mol_type = other RNA
tagataacagatgtgagga

SEQ ID NO: 1099 - RNA, 19 nt, synthetic construct
  source 1..19: mol_type = other RNA
tatgttaatgtggcataga

SEQ ID NO: 1100 - RNA, 19 nt, synthetic construct
  source 1..19: mol_type = other RNA
tgattctcatcaactttaa

SEQ ID NO: 1101 - RNA, 19 nt, synthetic construct
  source 1..19: mol_type = other RNA
tccatacttgattctcatc

SEQ ID NO: 1102 - RNA, 19 nt, synthetic construct
  source 1..19: mol_type = other RNA
ttccatacttgattctcat

SEQ ID NO: 1103 - RNA, 19 nt, synthetic construct
  source 1..19: mol_type = other RNA
ttttccatacttgattctc

SEQ ID NO: 1104 - RNA, 19 nt, synthetic construct
  source 1..19: mol_type = other RNA
tttttccatacttgattct

SEQ ID NO: 1105 - RNA, 19 nt, synthetic construct
  source 1..19: mol_type = other RNA
tcttttccatacttgattc

SEQ ID NO: 1106 - RNA, 19 nt, synthetic construct
  source 1..19: mol_type = other RNA
tacttttccatacttgatt

SEQ ID NO: 1107 - RNA, 19 nt, synthetic construct
  source 1..19: mol_type = other RNA
ttacttttccatacttgat

SEQ ID NO: 1108 - RNA, 19 nt, synthetic construct
  source 1..19: mol_type = other RNA
tttacttttccatacttga

SEQ ID NO: 1109 - RNA, 19 nt, synthetic construct
  source 1..19: mol_type = other RNA
tcttacttttccatacttg

SEQ ID NO: 1110 - RNA, 19 nt, synthetic construct
  source 1..19: mol_type = other RNA
tccttacttttccatactt

SEQ ID NO: 1111 - RNA, 19 nt, synthetic construct
  source 1..19: mol_type = other RNA
tgccttacttttccatact

SEQ ID NO: 1112 - RNA, 19 nt, synthetic construct
  source 1..19: mol_type = other RNA
tggccttacttttccatac

SEQ ID NO: 1113 - RNA, 18 nt, synthetic construct
  source 1..18: mol_type = other RNA
tatggccttacttttcca

SEQ ID NO: 1114 - RNA, 19 nt, synthetic construct
  source 1..19: mol_type = other RNA
tatgtaagagtatggcctt

SEQ ID NO: 1115 - RNA, 19 nt, synthetic construct
  source 1..19: mol_type = other RNA
ttattatgtaagagtatgg

SEQ ID NO: 1116 - RNA, 19 nt, synthetic construct
  source 1..19: mol_type = other RNA
ttctgtgattctttgaaaa

SEQ ID NO: 1117 - RNA, 19 nt, synthetic construct
  source 1..19: mol_type = other RNA
tttctgtgattctttgaaa

SEQ ID NO: 1118 - RNA, 19 nt, synthetic construct
  source 1..19: mol_type = other RNA
tattctgtgattctttgaa

SEQ ID NO: 1119 - RNA, 19 nt, synthetic construct
  source 1..19: mol_type = other RNA
ttactagaattctgtgatt

SEQ ID NO: 1120 - RNA, 19 nt, synthetic construct
  source 1..19: mol_type = other RNA
tgtactagaattctgtgat

SEQ ID NO: 1121 - RNA, 19 nt, synthetic construct
  source 1..19: mol_type = other RNA
tcttagaacagatttatga

SEQ ID NO: 1122 - RNA, 19 nt, synthetic construct
  source 1..19: mol_type = other RNA
ttcttagaacagatttatg

SEQ ID NO: 1123 - RNA, 19 nt, synthetic construct
  source 1..19: mol_type = other RNA
tgtcttagaacagatttat

SEQ ID NO: 1124 - RNA, 19 nt, synthetic construct
  source 1..19: mol_type = other RNA
ttgtcttagaacagattta

SEQ ID NO: 1125 - RNA, 19 nt, synthetic construct
  source 1..19: mol_type = other RNA
tatatgtcttagaacagat

SEQ ID NO: 1126 - RNA, 19 nt, synthetic construct
  source 1..19: mol_type = other RNA
ttcatatgtcttagaacag

SEQ ID NO: 1127 - RNA, 19 nt, synthetic construct
  source 1..19: mol_type = other RNA
tatcatatgtcttagaaca

SEQ ID NO: 1128 - RNA, 19 nt, synthetic construct
  source 1..19: mol_type = other RNA
tgttgatcatatgtcttag

SEQ ID NO: 1129 - RNA, 19 nt, synthetic construct
  source 1..19: mol_type = other RNA
ttgttgatcatatgtctta

SEQ ID NO: 1130 - RNA, 19 nt, synthetic construct
  source 1..19: mol_type = other RNA
ttcatctgttgatcatatg

SEQ ID NO: 1131 - RNA, 19 nt, synthetic construct
  source 1..19: mol_type = other RNA
tctcatctgttgatcatat

SEQ ID NO: 1132 - RNA, 19 nt, synthetic construct
  source 1..19: mol_type = other RNA
tgttctcatctgttgatca

SEQ ID NO: 1133 - RNA, 19 nt, synthetic construct
  source 1..19: mol_type = other RNA
tcagttctcatctgttgat

SEQ ID NO: 1134 - RNA, 19 nt, synthetic construct
  source 1..19: mol_type = other RNA
tccagttctcatctgttga

SEQ ID NO: 1135 - RNA, 19 nt, synthetic construct
  source 1..19: mol_type = other RNA
tgatatgactaatctcact

SEQ ID NO: 1136 - RNA, 19 nt, synthetic construct
  source 1..19: mol_type = other RNA
tgtgatatgactaatctca

SEQ ID NO: 1137 - RNA, 19 nt, synthetic construct
  source 1..19: mol_type = other RNA
tttgttagtatattagtga

SEQ ID NO: 1138 - RNA, 19 nt, synthetic construct
  source 1..19: mol_type = other RNA
tcagataattcactacagt

SEQ ID NO: 1139 - RNA, 19 nt, synthetic construct
  source 1..19: mol_type = other RNA
ttcagataattcactacag

SEQ ID NO: 1140 - RNA, 19 nt, synthetic construct
  source 1..19: mol_type = other RNA
tttaaggtttcatgattcc

SEQ ID NO: 1141 - RNA, 19 nt, synthetic construct
  source 1..19: mol_type = other RNA
tcttaaggtttcatgattc

SEQ ID NO: 1142 - RNA, 19 nt, synthetic construct
  source 1..19: mol_type = other RNA
ttcttaaggtttcatgatt

SEQ ID NO: 1143 - RNA, 19 nt, synthetic construct
  source 1..19: mol_type = other RNA
tgtcttaaggtttcatgat

SEQ ID NO: 1144 - RNA, 19 nt, synthetic construct
  source 1..19: mol_type = other RNA
tagtcttaaggtttcatga

SEQ ID NO: 1145 - RNA, 19 nt, synthetic construct
  source 1..19: mol_type = other RNA
taagtcttaaggtttcatg

SEQ ID NO: 1146 - RNA, 19 nt, synthetic construct
  source 1..19: mol_type = other RNA
tctgaagtcttaaggtttc

SEQ ID NO: 1147 - RNA, 19 nt, synthetic construct
  source 1..19: mol_type = other RNA
ttctgaagtcttaaggttt

SEQ ID NO: 1148 - RNA, 19 nt, synthetic construct
  source 1..19: mol_type = other RNA
tgaatggaagacaacctgc

SEQ ID NO: 1149 - RNA, 19 nt, synthetic construct
  source 1..19: mol_type = other RNA
tggaatggaagacaacctg

SEQ ID NO: 1150 - RNA, 19 nt, synthetic construct
  source 1..19: mol_type = other RNA
ttggaatggaagacaacct

SEQ ID NO: 1151 - RNA, 19 nt, synthetic construct
  source 1..19: mol_type = other RNA
tctgcattggatgttaggc

SEQ ID NO: 1152 - RNA, 19 nt, synthetic construct
  source 1..19: mol_type = other RNA
tcctgcattggatgttagg

SEQ ID NO: 1153 - RNA, 19 nt, synthetic construct
  source 1..19: mol_type = other RNA
tgcctgcattggatgttag

SEQ ID NO: 1154 - RNA, 19 nt, synthetic construct
  source 1..19: mol_type = other RNA
ttgcctgcattggatgtta

SEQ ID NO: 1155 - RNA, 19 nt, synthetic construct
  source 1..19: mol_type = other RNA
tttgcctgcattggatgtt

SEQ ID NO: 1156 - RNA, 19 nt, synthetic construct
  source 1..19: mol_type = other RNA
tcttgcctgcattggatgt

SEQ ID NO: 1157 - RNA, 19 nt, synthetic construct
  source 1..19: mol_type = other RNA
tccttgcctgcattggatg

SEQ ID NO: 1158 - RNA, 19 nt, synthetic construct
  source 1..19: mol_type = other RNA
ttccttgcctgcattggat

SEQ ID NO: 1159 - RNA, 19 nt, synthetic construct
  source 1..19: mol_type = other RNA
tttccttgcctgcattgga

SEQ ID NO: 1160 - RNA, 19 nt, synthetic construct
  source 1..19: mol_type = other RNA
ttttccttgcctgcattgg

SEQ ID NO: 1161 - RNA, 19 nt, synthetic construct
  source 1..19: mol_type = other RNA
tttttccttgcctgcattg

SEQ ID NO: 1162 - RNA, 19 nt, synthetic construct
  source 1..19: mol_type = other RNA
tattttccttgcctgcatt

SEQ ID NO: 1163 - RNA, 19 nt, synthetic construct
  source 1..19: mol_type = other RNA
tatcttttattttccttgc

SEQ ID NO: 1164 - RNA, 19 nt, synthetic construct
  source 1..19: mol_type = other RNA
tcactggaaatcttttatt

SEQ ID NO: 1165 - RNA, 19 nt, synthetic construct
  source 1..19: mol_type = other RNA
ttcactggaaatcttttat

SEQ ID NO: 1166 - RNA, 19 nt, synthetic construct
  source 1..19: mol_type = other RNA
tgtcactggaaatctttta

SEQ ID NO: 1167 - RNA, 19 nt, synthetic construct
  source 1..19: mol_type = other RNA
ttgtcactggaaatctttt

SEQ ID NO: 1168 - RNA, 19 nt, synthetic construct
  source 1..19: mol_type = other RNA
tggagagagaattcatata

SEQ ID NO: 1169 - RNA, 19 nt, synthetic construct
  source 1..19: mol_type = other RNA
ttggagagagaattcatat

SEQ ID NO: 1170 - RNA, 19 nt, synthetic construct
  source 1..19: mol_type = other RNA
tttggagagagaattcata

SEQ ID NO: 1171 - RNA, 19 nt, synthetic construct
  source 1..19: mol_type = other RNA
ttttggagagagaattcat

SEQ ID NO: 1172 - RNA, 19 nt, synthetic construct
  source 1..19: mol_type = other RNA
tatttggagagagaattca

SEQ ID NO: 1173 - RNA, 19 nt, synthetic construct
  source 1..19: mol_type = other RNA
ttatttggagagagaattc

SEQ ID NO: 1174 - RNA, 19 nt, synthetic construct
  source 1..19: mol_type = other RNA
tatatttggagagagaatt

SEQ ID NO: 1175 - RNA, 19 nt, synthetic construct
  source 1..19: mol_type = other RNA
taatatttggagagagaat

SEQ ID NO: 1176 - RNA, 19 nt, synthetic construct
  source 1..19: mol_type = other RNA
tccaacaagttcatttcaa

SEQ ID NO: 1177 - RNA, 19 nt, synthetic construct
  source 1..19: mol_type = other RNA
tggccaacaagttcatttc

SEQ ID NO: 1178 - RNA, 19 nt, synthetic construct
  source 1..19: mol_type = other RNA
tgggccaacaagttcattt

SEQ ID NO: 1179 - RNA, 19 nt, synthetic construct
  source 1..19: mol_type = other RNA
ttgggccaacaagttcatt

SEQ ID NO: 1180 - RNA, 19 nt, synthetic construct
  source 1..19: mol_type = other RNA
tatagatgggccaacaagt

SEQ ID NO: 1181 - RNA, 19 nt, synthetic construct
  source 1..19: mol_type = other RNA
ttaatagatgggccaacaa

SEQ ID NO: 1182 - RNA, 19 nt, synthetic construct
  source 1..19: mol_type = other RNA
tatgtaatagatgggccaa

SEQ ID NO: 1183 - RNA, 19 nt, synthetic construct
  source 1..19: mol_type = other RNA
tgtagatgtaatagatggg

SEQ ID NO: 1184 - RNA, 19 nt, synthetic construct
  source 1..19: mol_type = other RNA
ttgtagatgtaatagatgg

SEQ ID NO: 1185 - RNA, 19 nt, synthetic construct
  source 1..19: mol_type = other RNA
tctgtagatgtaatagatg

SEQ ID NO: 1186 - RNA, 19 nt, synthetic construct
  source 1..19: mol_type = other RNA
tgctgtagatgtaatagat

SEQ ID NO: 1187 - RNA, 19 nt, synthetic construct
  source 1..19: mol_type = other RNA
tagctgtagatgtaataga

SEQ ID NO: 1188 - RNA, 19 nt, synthetic construct
  source 1..19: mol_type = other RNA
tcagctgtagatgtaatag

SEQ ID NO: 1189 - RNA, 19 nt, synthetic construct
  source 1..19: mol_type = other RNA
ttcagctgtagatgtaata

SEQ ID NO: 1190 - RNA, 19 nt, synthetic construct
  source 1..19: mol_type = other RNA
tgtcagctgtagatgtaat

SEQ ID NO: 1191 - RNA, 19 nt, synthetic construct
  source 1..19: mol_type = other RNA
tggtcagctgtagatgtaa

SEQ ID NO: 1192 - RNA, 19 nt, synthetic construct
  source 1..19: mol_type = other RNA
tgggtcagctgtagatgta

SEQ ID NO: 1193 - RNA, 19 nt, synthetic construct
  source 1..19: mol_type = other RNA
tagggtcagctgtagatgt

SEQ ID NO: 1194 - RNA, 19 nt, synthetic construct
  source 1..19: mol_type = other RNA
taagggtcagctgtagatg

SEQ ID NO: 1195 - RNA, 19 nt, synthetic construct
  source 1..19: mol_type = other RNA
tcaagggtcagctgtagat

SEQ ID NO: 1196 - RNA, 19 nt, synthetic construct
  source 1..19: mol_type = other RNA
tgtcagctcccctaacccc

SEQ ID NO: 1197 - RNA, 19 nt, synthetic construct
  source 1..19: mol_type = other RNA
ttgtcagctcccctaaccc

SEQ ID NO: 1198 - RNA, 19 nt, synthetic construct
  source 1..19: mol_type = other RNA
tttgtcagctcccctaacc

SEQ ID NO: 1199 - RNA, 19 nt, synthetic construct
  source 1..19: mol_type = other RNA
tattgtcagctcccctaac

SEQ ID NO: 1200 - RNA, 19 nt, synthetic construct
  source 1..19: mol_type = other RNA
ttaggtagttaagattttg

SEQ ID NO: 1201 - RNA, 19 nt, synthetic construct
  source 1..19: mol_type = other RNA
ttattaggtagttaagatt

SEQ ID NO: 1202 - RNA, 19 nt, synthetic construct
  source 1..19: mol_type = other RNA
tctattaggtagttaagat

SEQ ID NO: 1203 - RNA, 19 nt, synthetic construct
  source 1..19: mol_type = other RNA
taggctattaggtagttaa

SEQ ID NO: 1204 - RNA, 19 nt, synthetic construct
  source 1..19: mol_type = other RNA
ttaggctattaggtagtta

SEQ ID NO: 1205 - RNA, 19 nt, synthetic construct
  source 1..19: mol_type = other RNA
tagtaggctattaggtagt

SEQ ID NO: 1206 - RNA, 19 nt, synthetic construct
  source 1..19: mol_type = other RNA
tgtaaggtttatggtcaat

SEQ ID NO: 1207 - RNA, 19 nt, synthetic construct
  source 1..19: mol_type = other RNA
tagtaaggtttatggtcaa

SEQ ID NO: 1208 - RNA, 19 nt, synthetic construct
  source 1..19: mol_type = other RNA
tcagtaaggtttatggtca

SEQ ID NO: 1209 - RNA, 19 nt, synthetic construct
  source 1..19: mol_type = other RNA
ttcagtaaggtttatggtc

SEQ ID NO: 1210 - RNA, 19 nt, synthetic construct
  source 1..19: mol_type = other RNA
tatcagtaaggtttatggt

SEQ ID NO: 1211 - RNA, 19 nt, synthetic construct
  source 1..19: mol_type = other RNA
ttatcagtaaggtttatgg

SEQ ID NO: 1212 - RNA, 19 nt, synthetic construct
  source 1..19: mol_type = other RNA
tttatcagtaaggtttatg

SEQ ID NO: 1213 - RNA, 19 nt, synthetic construct
  source 1..19: mol_type = other RNA
tgttatcagtaaggtttat

SEQ ID NO: 1214 - RNA, 19 nt, synthetic construct
  source 1..19: mol_type = other RNA
ttactgtttatgttatcag

SEQ ID NO: 1215 - RNA, 19 nt, synthetic construct
  source 1..19: mol_type = other RNA
tcccacttccatttaatga

SEQ ID NO: 1216 - RNA, 19 nt, synthetic construct
  source 1..19: mol_type = other RNA
tacccacttccatttaatg

SEQ ID NO: 1217 - RNA, 19 nt, synthetic construct
  source 1..19: mol_type = other RNA
tgaagacaatgagaatgaa

SEQ ID NO: 1218 - RNA, 19 nt, synthetic construct
  source 1..19: mol_type = other RNA
ttgaagacaatgagaatga

SEQ ID NO: 1219 - RNA, 19 nt, synthetic construct
  source 1..19: mol_type = other RNA
tgtgaagacaatgagaatg

SEQ ID NO: 1220 - RNA, 19 nt, synthetic construct
  source 1..19: mol_type = other RNA
taatgtgaagacaatgaga

SEQ ID NO: 1221 - RNA, 19 nt, synthetic construct
  source 1..19: mol_type = other RNA
tacacccctaagacaagac

SEQ ID NO: 1222 - RNA, 19 nt, synthetic construct
  source 1..19: mol_type = other RNA
tcacacccctaagacaaga

SEQ ID NO: 1223 - RNA, 19 nt, synthetic construct
  source 1..19: mol_type = other RNA
tccacttatacatgaatat

SEQ ID NO: 1224 - RNA, 19 nt, synthetic construct
  source 1..19: mol_type = other RNA
tagggtccacttatacatg

SEQ ID NO: 1225 - RNA, 19 nt, synthetic construct
  source 1..19: mol_type = other RNA
tagaggagaaattgaaaat

SEQ ID NO: 1226 - RNA, 19 nt, synthetic construct
  source 1..19: mol_type = other RNA
tcagaggagaaattgaaaa

SEQ ID NO: 1227 - RNA, 19 nt, synthetic construct
  source 1..19: mol_type = other RNA
ttcagaggagaaattgaaa

SEQ ID NO: 1228 - DNA, 19 bp, synthetic construct
  source 1..19: mol_type = other DNA
  misc_feature 1..8: note = RNA
  misc_feature 9: note = DNA
  misc_feature 10: note = RNA
  misc_feature 11: note = DNA
  misc_feature 12..15: note = RNA
  misc_feature 16: note = DNA
  misc_feature 17..19: note = RNA
tagccaaatatgagataac

SEQ ID NO: 1229 - DNA, 19 bp, synthetic construct
  source 1..19: mol_type = other DNA
  misc_feature 1: note = RNA
  misc_feature 2: note = DNA
  misc_feature 3..5: note = RNA
  misc_feature 6..9: note = DNA
  misc_feature 10..13: note = RNA
  misc_feature 14: note = DNA
  misc_feature 15..16: note = RNA
  misc_feature 17..18: note = DNA
  misc_feature 19: note = RNA
ttagcttttgacgtgcttg

SEQ ID NO: 1230 - DNA, 19 bp, synthetic construct
  source 1..19: mol_type = other DNA
  misc_feature 1: note = RNA
  misc_feature 2: note = DNA
  misc_feature 3: note = RNA
  misc_feature 4: note = DNA
  misc_feature 5..7: note = RNA
  misc_feature 8..11: note = DNA
  misc_feature 12..15: note = RNA
  misc_feature 16: note = DNA
  misc_feature 17..18: note = RNA
  misc_feature 19: note = DNA
ttgtagcttttgacgtgct

SEQ ID NO: 1231 - DNA, 19 bp, synthetic construct
  source 1..19: mol_type = other DNA
  misc_feature 1..2: note = RNA
  misc_feature 3..4: note = DNA
  misc_feature 5: note = RNA
  misc_feature 6: note = DNA
  misc_feature 7: note = RNA
  misc_feature 8: note = DNA
  misc_feature 9..11: note = RNA
  misc_feature 12..15: note = DNA
  misc_feature 16..19: note = RNA
tattctgtagcttttgacg

SEQ ID NO: 1232 - DNA, 19 bp, synthetic construct
  source 1..19: mol_type = other DNA
  misc_feature 1..3: note = RNA
  misc_feature 4..5: note = DNA
  misc_feature 6: note = RNA
  misc_feature 7: note = DNA
  misc_feature 8: note = RNA
  misc_feature 9: note = DNA
  misc_feature 10..12: note = RNA
  misc_feature 13..16: note = DNA
  misc_feature 17..19: note = RNA
tgattctgtagcttttgac

SEQ ID NO: 1233 - DNA, 19 bp, synthetic construct
  source 1..19: mol_type = other DNA
  misc_feature 1..5: note = RNA
  misc_feature 6..9: note = DNA
  misc_feature 10..11: note = RNA
  misc_feature 12: note = DNA
  misc_feature 13: note = RNA
  misc_feature 14..16: note = DNA
  misc_feature 17..19: note = RNA
tgcccttttcatgtttaca

SEQ ID NO: 1234 - DNA, 19 bp, synthetic construct
  source 1..19: mol_type = other DNA
  misc_feature 1..6: note = RNA
  misc_feature 7..10: note = DNA
  misc_feature 11..12: note = RNA
  misc_feature 13: note = DNA
  misc_feature 14: note = RNA
  misc_feature 15..17: note = DNA
  misc_feature 18..19: note = RNA
tagcccttttcatgtttac

SEQ ID NO: 1235 - DNA, 19 bp, synthetic construct
  source 1..19: mol_type = other DNA
  misc_feature 1..7: note = RNA
  misc_feature 8..9: note = DNA
  misc_feature 10: note = RNA
  misc_feature 11: note = DNA
  misc_feature 12..13: note = RNA
  misc_feature 14: note = DNA
  misc_feature 15: note = RNA
  misc_feature 16: note = DNA
  misc_feature 17: note = RNA
  misc_feature 18..19: note = DNA
tcaccagttctcatctgtt

SEQ ID NO: 1236 - DNA, 19 bp, synthetic construct
  source 1..19: mol_type = other DNA
  misc_feature 1..8: note = RNA
  misc_feature 9..10: note = DNA
  misc_feature 11: note = RNA
  misc_feature 12: note = DNA
  misc_feature 13..14: note = RNA
  misc_feature 15: note = DNA
  misc_feature 16: note = RNA
  misc_feature 17: note = DNA
  misc_feature 18: note = RNA
  misc_feature 19: note = DNA
tccaccagttctcatctgt

SEQ ID NO: 1237 - DNA, 19 bp, synthetic construct
  source 1..19: mol_type = other DNA
  misc_feature 1..9: note = RNA
  misc_feature 10..11: note = DNA
  misc_feature 12: note = RNA
  misc_feature 13: note = DNA
  misc_feature 14..15: note = RNA
  misc_feature 16: note = DNA
  misc_feature 17: note = RNA
  misc_feature 18: note = DNA
  misc_feature 19: note = RNA
taccaccagttctcatctg

SEQ ID NO: 1238 - DNA, 19 bp, synthetic construct
  source 1..19: mol_type = other DNA
  misc_feature 1..10: note = RNA
  misc_feature 11..12: note = DNA
  misc_feature 13: note = RNA
  misc_feature 14: note = DNA
  misc_feature 15..16: note = RNA
  misc_feature 17: note = DNA
  misc_feature 18: note = RNA
  misc_feature 19: note = DNA
taaccaccagttctcatct

SEQ ID NO: 1239 - DNA, 19 bp, synthetic construct
  source 1..19: mol_type = other DNA
  misc_feature 1: note = RNA
  misc_feature 2: note = DNA
  misc_feature 3..11: note = RNA
  misc_feature 12..13: note = DNA
  misc_feature 14: note = RNA
  misc_feature 15: note = DNA
  misc_feature 16..17: note = RNA
  misc_feature 18: note = DNA
  misc_feature 19: note = RNA
ttaaccaccagttctcatc

SEQ ID NO: 1240 - DNA, 19 bp, synthetic construct
  source 1..19: mol_type = other DNA
  misc_feature 1: note = RNA
  misc_feature 2..3: note = DNA
  misc_feature 4..12: note = RNA
  misc_feature 13..14: note = DNA
  misc_feature 15: note = RNA
  misc_feature 16: note = DNA
  misc_feature 17..18: note = RNA
  misc_feature 19: note = DNA
tttaaccaccagttctcat

SEQ ID NO: 1241 - DNA, 19 bp, synthetic construct
  source 1..19: mol_type = other DNA
  misc_feature 1..2: note = RNA
  misc_feature 3..4: note = DNA
  misc_feature 5..13: note = RNA
  misc_feature 14..15: note = DNA
  misc_feature 16: note = RNA
  misc_feature 17: note = DNA
  misc_feature 18..19: note = RNA
tattaaccaccagttctca

SEQ ID NO: 1242 - DNA, 19 bp, synthetic construct
  source 1..19: mol_type = other DNA
  misc_feature 1: note = RNA
  misc_feature 2: note = DNA
  misc_feature 3: note = RNA
  misc_feature 4..5: note = DNA
  misc_feature 6..14: note = RNA
  misc_feature 15..16: note = DNA
  misc_feature 17: note = RNA
  misc_feature 18: note = DNA
  misc_feature 19: note = RNA
ttattaaccaccagttctc

SEQ ID NO: 1243 - DNA, 19 bp, synthetic construct
  source 1..19: mol_type = other DNA
  misc_feature 1..2: note = RNA
  misc_feature 3: note = DNA
  misc_feature 4: note = RNA
  misc_feature 5..6: note = DNA
  misc_feature 7..15: note = RNA
  misc_feature 16..17: note = DNA
  misc_feature 18: note = RNA
  misc_feature 19: note = DNA
tatattaaccaccagttct

SEQ ID NO: 1244 - DNA, 19 bp, synthetic construct
  source 1..19: mol_type = other DNA
  misc_feature 1..4: note = RNA
  misc_feature 5..7: note = DNA
  misc_feature 8..9: note = RNA
  misc_feature 10: note = DNA
  misc_feature 11..12: note = RNA
  misc_feature 13..14: note = DNA
  misc_feature 15..19: note = RNA
taggtttcatgattccaaa

SEQ ID NO: 1245 - DNA, 19 bp, synthetic construct
  source 1..19: mol_type = other DNA
  misc_feature 1..5: note = RNA
  misc_feature 6..8: note = DNA
  misc_feature 9..10: note = RNA
  misc_feature 11: note = DNA
  misc_feature 12..13: note = RNA
  misc_feature 14..15: note = DNA
  misc_feature 16..19: note = RNA
taaggtttcatgattccaa

SEQ ID NO: 1246 - DNA, 19 bp, synthetic construct
  source 1..19: mol_type = other DNA
  misc_feature 1..2: note = RNA
  misc_feature 3..6: note = DNA
  misc_feature 7: note = RNA
  misc_feature 8: note = DNA
  misc_feature 9: note = RNA
  misc_feature 10: note = DNA
  misc_feature 11..13: note = RNA
  misc_feature 14..15: note = DNA
  misc_feature 16..17: note = RNA
  misc_feature 18..19: note = DNA
tattttctctagcttactt

SEQ ID NO: 1247 - DNA, 19 bp, synthetic construct
  source 1..19: mol_type = other DNA
  misc_feature 1..3: note = RNA
  misc_feature 4..7: note = DNA
  misc_feature 8: note = RNA
  misc_feature 9: note = DNA
  misc_feature 10: note = RNA
  misc_feature 11: note = DNA
  misc_feature 12..14: note = RNA
  misc_feature 15..16: note = DNA
  misc_feature 17..18: note = RNA
  misc_feature 19: note = DNA
tcattttctctagcttact

SEQ ID NO: 1248 - DNA, 19 bp, synthetic construct
  source 1..19: mol_type = other DNA
  misc_feature 1..4: note = RNA
  misc_feature 5..8: note = DNA
  misc_feature 9: note = RNA
  misc_feature 10: note = DNA
  misc_feature 11: note = RNA
  misc_feature 12: note = DNA
  misc_feature 13..15: note = RNA
  misc_feature 16..17: note = DNA
  misc_feature 18..19: note = RNA
tacattttctctagcttac

SEQ ID NO: 1249 - DNA, 19 bp, synthetic construct
  source 1..19: mol_type = other DNA
  misc_feature 1..5: note = RNA
  misc_feature 6..7: note = DNA
  misc_feature 8..10: note = RNA
  misc_feature 11..13: note = DNA
  misc_feature 14..15: note = RNA
  misc_feature 16: note = DNA
  misc_feature 17..19: note = RNA
tccacttccatttaatgaa

SEQ ID NO: 1250 - DNA, 19 bp, synthetic construct
  source 1..19: mol_type = other DNA
  misc_feature 1..4: note = RNA
  misc_feature 5: note = DNA
  misc_feature 6..10: note = RNA
  misc_feature 11: note = DNA
  misc_feature 12..17: note = RNA
  misc_feature 18..19: note = DNA
tcaatgagaatgaagactt

SEQ ID NO: 1251 - DNA, 19 bp, synthetic construct
  source 1..19: mol_type = other DNA
  misc_feature 1..5: note = RNA
  misc_feature 6: note = DNA
  misc_feature 7..11: note = RNA
  misc_feature 12: note = DNA
  misc_feature 13..18: note = RNA
  misc_feature 19: note = DNA
tacaatgagaatgaagact

SEQ ID NO: 1252 - DNA, 19 bp, synthetic construct
  source 1..19: mol_type = other DNA
  misc_feature 1..6: note = RNA
  misc_feature 7: note = DNA
  misc_feature 8..12: note = RNA
  misc_feature 13: note = DNA
  misc_feature 14..19: note = RNA
tgacaatgagaatgaagac

SEQ ID NO: 1253 - DNA, 19 bp, synthetic construct
  source 1..19: mol_type = other DNA
  misc_feature 1..7: note = RNA
  misc_feature 8: note = DNA
  misc_feature 9..13: note = RNA
  misc_feature 14: note = DNA
  misc_feature 15..19: note = RNA
tagacaatgagaatgaaga

SEQ ID NO: 1254 - DNA, 19 bp, synthetic construct
  source 1..19: mol_type = other DNA
  misc_feature 1..10: note = RNA
  misc_feature 11: note = DNA
  misc_feature 12..19: note = RNA
tccacacccctaagacaag

SEQ ID NO: 1255 - DNA, 19 bp, synthetic construct
  source 1..19: mol_type = other DNA
  misc_feature 1: note = RNA
  misc_feature 2: note = DNA
  misc_feature 3..6: note = RNA
  misc_feature 7..8: note = DNA
  misc_feature 9: note = RNA
  misc_feature 10: note = DNA
  misc_feature 11..13: note = RNA
  misc_feature 14: note = DNA
  misc_feature 15..17: note = RNA
  misc_feature 18: note = DNA
  misc_feature 19: note = RNA
ttccacttatacatgaata

SEQ ID NO: 1256 - DNA, 19 bp, synthetic construct
  source 1..19: mol_type = other DNA
  misc_feature 1..4: note = RNA
  misc_feature 5: note = DNA
  misc_feature 6..9: note = RNA
  misc_feature 10..11: note = DNA
  misc_feature 12: note = RNA
  misc_feature 13: note = DNA
  misc_feature 14..16: note = RNA
  misc_feature 17: note = DNA
  misc_feature 18..19: note = RNA
tgggtccacttatacatga

SEQ ID NO: 1257 - RNA, 19 nt, synthetic construct
  source 1..19: mol_type = other RNA
  modified_base 1: mod_base = OTHER; note = 2'-O-methyl-adenosine-3'-phosphorothioate
  modified_base 2: mod_base = OTHER; note = 2'-O-methyl-adenosine-3'-phosphorothioate
  modified_base 3: mod_base = OTHER; note = 2'-O-methyl-guanosine-3'-phosphate
  modified_base 4: mod_base = OTHER; note = 2'-O-methyl-uridine-3'-phosphate
  modified_base 5: mod_base = OTHER; note = 2'-deoxy-2'-fluoro-cytidine-3'-phosphate
  modified_base 6: mod_base = OTHER; note = 2'-O-methyl-cytidine-3'-phosphate
  modified_base 7: mod_base = OTHER; note = 2'-deoxy-2'-fluoro-adenosine-3'-phosphate
  modified_base 8: mod_base = OTHER; note = 2'-deoxy-2'-fluoro-adenosine-3'-phosphate
  modified_base 9: mod_base = OTHER; note = 2'-deoxy-2'-fluoro-uridine-3'-phosphate
  modified_base 10: mod_base = OTHER; note = 2'-O-methyl-adenosine-3'-phosphate
  modified_base 11: mod_base = OTHER; note = 2'-O-methyl-cytidine-3'-phosphate
  modified_base 12: mod_base = OTHER; note = 2'-O-methyl-cytidine-3'-phosphate
  modified_base 13: mod_base = OTHER; note = 2'-O-methyl-uridine-3'-phosphate
  modified_base 14: mod_base = OTHER; note = 2'-O-methyl-cytidine-3'-phosphate
  modified_base 15: mod_base = OTHER; note = 2'-O-methyl-adenosine-3'-phosphate
  modified_base 16: mod_base = OTHER; note = 2'-O-methyl-cytidine-3'-phosphate
  modified_base 17: mod_base = OTHER; note = 2'-O-methyl-uridine-3'-phosphate
  modified_base 18: mod_base = OTHER; note = 2'-O-methyl-cytidine-3'-phosphate
  modified_base 19: mod_base = OTHER; note = 2'-O-methyl-guanosine-3'-phosphate
aagtccaatacctcactcg

SEQ ID NO: 1258 - RNA, 19 nt, synthetic construct
  source 1..19: mol_type = other RNA
  modified_base 1: mod_base = OTHER; note = 2'-O-methyl-uridine-3'-phosphorothioate
  modified_base 2: mod_base = OTHER; note = 2'-O-methyl-adenosine-3'-phosphorothioate
  modified_base 3: mod_base = OTHER; note = 2'-O-methyl-guanosine-3'-phosphate
  modified_base 4: mod_base = OTHER; note = 2'-O-methyl-cytidine-3'-phosphate
  modified_base 5: mod_base = OTHER; note = 2'-deoxy-2'-fluoro-uridine-3'-phosphate
  modified_base 6: mod_base = OTHER; note = 2'-O-methyl-uridine-3'-phosphate
  modified_base 7: mod_base = OTHER; note = 2'-deoxy-2'-fluoro-adenosine-3'-phosphate
  modified_base 8: mod_base = OTHER; note = 2'-deoxy-2'-fluoro-cytidine-3'-phosphate
  modified_base 9: mod_base = OTHER; note = 2'-deoxy-2'-fluoro-cytidine-3'-phosphate
  modified_base 10: mod_base = OTHER; note = 2'-O-methyl-adenosine-3'-phosphate
  modified_base 11: mod_base = OTHER; note = 2'-O-methyl-uridine-3'-phosphate
  modified_base 12: mod_base = OTHER; note = 2'-O-methyl-adenosine-3'-phosphate
  modified_base 13: mod_base = OTHER; note = 2'-O-methyl-cytidine-3'-phosphate
  modified_base 14: mod_base = OTHER; note = 2'-O-methyl-uridine-3'-phosphate
  modified_base 15: mod_base = OTHER; note = 2'-O-methyl-adenosine-3'-phosphate
  modified_base 16: mod_base = OTHER; note = 2'-O-methyl-uridine-3'-phosphate
  modified_base 17: mod_base = OTHER; note = 2'-O-methyl-adenosine-3'-phosphate
  modified_base 18: mod_base = OTHER; note = 2'-O-methyl-uridine-3'-phosphate
  modified_base 19: mod_base = OTHER; note = 2'-O-methyl-cytidine-3'-phosphate
tagcttaccatactatatc

SEQ ID NO: 1259 - RNA, 19 nt, synthetic construct
  source 1..19: mol_type = other RNA
  modified_base 1: mod_base = OTHER; note = 2'-O-methyl-guanosine-3'-phosphorothioate
  modified_base 2: mod_base = OTHER; note = 2'-O-methyl-cytidine-3'-phosphorothioate
  modified_base 3: mod_base = OTHER; note = 2'-O-methyl-uridine-3'-phosphate
  modified_base 4: mod_base = OTHER; note = 2'-O-methyl-uridine-3'-phosphate
  modified_base 5: mod_base = OTHER; note = 2'-deoxy-2'-fluoro-adenosine-3'-phosphate
  modified_base 6: mod_base = OTHER; note = 2'-O-methyl-cytidine-3'-phosphate
  modified_base 7: mod_base = OTHER; note = 2'-deoxy-2'-fluoro-cytidine-3'-phosphate
  modified_base 8: mod_base = OTHER; note = 2'-deoxy-2'-fluoro-adenosine-3'-phosphate
  modified_base 9: mod_base = OTHER; note = 2'-deoxy-2'-fluoro-uridine-3'-phosphate
  modified_base 10: mod_base = OTHER; note = 2'-O-methyl-adenosine-3'-phosphate
  modified_base 11: mod_base = OTHER; note = 2'-O-methyl-cytidine-3'-phosphate
  modified_base 12: mod_base = OTHER; note = 2'-O-methyl-uridine-3'-phosphate
  modified_base 13: mod_base = OTHER; note = 2'-O-methyl-adenosine-3'-phosphate
  modified_base 14: mod_base = OTHER; note = 2'-O-methyl-uridine-3'-phosphate
  modified_base 15: mod_base = OTHER; note = 2'-O-methyl-adenosine-3'-phosphate
  modified_base 16: mod_base = OTHER; note = 2'-O-methyl-uridine-3'-phosphate
  modified_base 17: mod_base = OTHER; note = 2'-O-methyl-cytidine-3'-phosphate
  modified_base 18: mod_base = OTHER; note = 2'-O-methyl-uridine-3'-phosphate
  modified_base 19: mod_base = OTHER; note = 2'-O-methyl-uridine-3'-phosphate
gcttaccatactatatctt

SEQ ID NO: 1260 - RNA, 19 nt, synthetic construct
  source 1..19: mol_type = other RNA
  modified_base 1: mod_base = OTHER; note = 2'-O-methyl-guanosine-3'-phosphorothioate
  modified_base 2: mod_base = OTHER; note = 2'-O-methyl-adenosine-3'-phosphorothioate
  modified_base 3: mod_base = OTHER; note = 2'-O-methyl-cytidine-3'-phosphate
  modified_base 4: mod_base = OTHER; note = 2'-O-methyl-adenosine-3'-phosphate
  modified_base 5: mod_base = OTHER; note = 2'-deoxy-2'-fluoro-adenosine-3'-phosphate
  modified_base 6: mod_base = OTHER; note = 2'-O-methyl-uridine-3'-phosphate
  modified_base 7: mod_base = OTHER; note = 2'-deoxy-2'-fluoro-uridine-3'-phosphate
  modified_base 8: mod_base = OTHER; note = 2'-deoxy-2'-fluoro-cytidine-3'-phosphate
  modified_base 9: mod_base = OTHER; note = 2'-deoxy-2'-fluoro-guanosine-3'-phosphate
  modified_base 10: mod_base = OTHER; note = 2'-O-methyl-uridine-3'-phosphate
  modified_base 11: mod_base = OTHER; note = 2'-O-methyl-guanosine-3'-phosphate
  modified_base 12: mod_base = OTHER; note = 2'-O-methyl-guanosine-3'-phosphate
  modified_base 13: mod_base = OTHER; note = 2'-O-methyl-guanosine-3'-phosphate
  modified_base 14: mod_base = OTHER; note = 2'-O-methyl-uridine-3'-phosphate
  modified_base 15: mod_base = OTHER; note = 2'-O-methyl-cytidine-3'-phosphate
  modified_base 16: mod_base = OTHER; note = 2'-O-methyl-cytidine-3'-phosphate
  modified_base 17: mod_base = OTHER; note = 2'-O-methyl-guanosine-3'-phosphate
  modified_base 18: mod_base = OTHER; note = 2'-O-methyl-cytidine-3'-phosphate
  modified_base 19: mod_base = OTHER; note = 2'-O-methyl-adenosine-3'-phosphate
gacaattcgtgggtccgca

SEQ ID NO: 1261 - RNA, 19 nt, synthetic construct
  source 1..19: mol_type = other RNA
  modified_base 1: mod_base = OTHER; note = 2'-O-methyl-adenosine-3'-phosphorothioate
  modified_base 2: mod_base = OTHER; note = 2'-O-methyl-guanosine-3'-phosphorothioate
  modified_base 3: mod_base = OTHER; note = 2'-O-methyl-adenosine-3'-phosphate
  modified_base 4: mod_base = OTHER; note = 2'-O-methyl-uridine-3'-phosphate
  modified_base 5: mod_base = OTHER; note = 2'-deoxy-2'-fluoro-uridine-3'-phosphate
  modified_base 6: mod_base = OTHER; note = 2'-O-methyl-uridine-3'-phosphate
  modified_base 7: mod_base = OTHER; note = 2'-deoxy-2'-fluoro-cytidine-3'-phosphate
  modified_base 8: mod_base = OTHER; note = 2'-deoxy-2'-fluoro-uridine-3'-phosphate
  modified_base 9: mod_base = OTHER; note = 2'-deoxy-2'-fluoro-uridine-3'-phosphate
  modified_base 10: mod_base = OTHER; note = 2'-O-methyl-adenosine-3'-phosphate
  modified_base 11: mod_base = OTHER; note = 2'-O-methyl-adenosine-3'-phosphate
  modified_base 12: mod_base = OTHER; note = 2'-O-methyl-guanosine-3'-phosphate
  modified_base 13: mod_base = OTHER; note = 2'-O-methyl-uridine-3'-phosphate
  modified_base 14: mod_base = OTHER; note = 2'-O-methyl-guanosine-3'-phosphate
  modified_base 15: mod_base = OTHER; note = 2'-O-methyl-adenosine-3'-phosphate
  modified_base 16: mod_base = OTHER; note = 2'-O-methyl-cytidine-3'-phosphate
  modified_base 17: mod_base = OTHER; note = 2'-O-methyl-guanosine-3'-phosphate
  modified_base 18: mod_base = OTHER; note = 2'-O-methyl-cytidine-3'-phosphate
  modified_base 19: mod_base = OTHER; note = 2'-O-methyl-cytidine-3'-phosphate
agatttcttaagtgacgcc

SEQ ID NO: 1262 - RNA, 19 nt, synthetic construct
  source 1..19: mol_type = other RNA
  modified_base 1: mod_base = OTHER; note = 2'-O-methyl-cytidine-3'-phosphorothioate
  modified_base 2: mod_base = OTHER; note = 2'-O-methyl-uridine-3'-phosphorothioate
  modified_base 3: mod_base = OTHER; note = 2'-O-methyl-uridine-3'-phosphate
  modified_base 4: mod_base = OTHER; note = 2'-O-methyl-adenosine-3'-phosphate
  modified_base 5: mod_base = OTHER; note = 2'-deoxy-2'-fluoro-adenosine-3'-phosphate
  modified_base 6: mod_base = OTHER; note = 2'-O-methyl-guanosine-3'-phosphate
  modified_base 7: mod_base = OTHER; note = 2'-deoxy-2'-fluoro-uridine-3'-phosphate
  modified_base 8: mod_base = OTHER; note = 2'-deoxy-2'-fluoro-guanosine-3'-phosphate
  modified_base 9: mod_base = OTHER; note = 2'-deoxy-2'-fluoro-adenosine-3'-phosphate
  modified_base 10: mod_base = OTHER; note = 2'-O-methyl-cytidine-3'-phosphate
  modified_base 11: mod_base = OTHER; note = 2'-O-methyl-guanosine-3'-phosphate
  modified_base 12: mod_base = OTHER; note = 2'-O-methyl-cytidine-3'-phosphate
  modified_base 13: mod_base = OTHER; note = 2'-O-methyl-cytidine-3'-phosphate
  modified_base 14: mod_base = OTHER; note = 2'-O-methyl-uridine-3'-phosphate
  modified_base 15: mod_base = OTHER; note = 2'-O-methyl-cytidine-3'-phosphate
  modified_base 16: mod_base = OTHER; note = 2'-O-methyl-adenosine-3'-phosphate
  modified_base 17: mod_base = OTHER; note = 2'-O-methyl-uridine-3'-phosphate
  modified_base 18: mod_base = OTHER; note = 2'-O-methyl-cytidine-3'-phosphate
  modified_base 19: mod_base = OTHER; note = 2'-O-methyl-uridine-3'-phosphate
cttaagtgacgcctcatct

SEQ ID NO: 1263 - RNA, 19 nt, synthetic construct
  source 1..19: mol_type = other RNA
  modified_base 1: mod_base = OTHER; note = 2'-O-methyl-cytidine-3'-phosphorothioate
  modified_base 2: mod_base = OTHER; note = 2'-O-methyl-cytidine-3'-phosphorothioate
  modified_base 3: mod_base = OTHER; note = 2'-O-methyl-cytidine-3'-phosphate
  modified_base 4: mod_base = OTHER; note = 2'-O-methyl-guanosine-3'-phosphate
  modified_base 5: mod_base = OTHER; note = 2'-deoxy-2'-fluoro-uridine-3'-phosphate
  modified_base 6: mod_base = OTHER; note = 2'-O-methyl-adenosine-3'-phosphate
  modified_base 7: mod_base = OTHER; note = 2'-deoxy-2'-fluoro-adenosine-3'-phosphate
  modified_base 8: mod_base = OTHER; note = 2'-deoxy-2'-fluoro-guanosine-3'-phosphate
  modified_base 9: mod_base = OTHER; note = 2'-deoxy-2'-fluoro-adenosine-3'-phosphate
  modified_base 10: mod_base = OTHER; note = 2'-O-methyl-cytidine-3'-phosphate
  modified_base 11: mod_base = OTHER; note = 2'-O-methyl-uridine-3'-phosphate
  modified_base 12: mod_base = OTHER; note = 2'-O-methyl-uridine-3'-phosphate
  modified_base 13: mod_base = OTHER; note = 2'-O-methyl-cytidine-3'-phosphate
  modified_base 14: mod_base = OTHER; note = 2'-O-methyl-adenosine-3'-phosphate
  modified_base 15: mod_base = OTHER; note = 2'-O-methyl-uridine-3'-phosphate
  modified_base 16: mod_base = OTHER; note = 2'-O-methyl-adenosine-3'-phosphate
  modified_base 17: mod_base = OTHER; note = 2'-O-methyl-cytidine-3'-phosphate
  modified_base 18: mod_base = OTHER; note = 2'-O-methyl-adenosine-3'-phosphate
  modified_base 19: mod_base = OTHER; note = 2'-O-methyl-adenosine-3'-phosphate
cccgtaagacttcatacaa

SEQ ID NO: 1264 - RNA, 19 nt, synthetic construct
  source 1..19: mol_type = other RNA
  modified_base 1: mod_base = OTHER; note = 2'-O-methyl-cytidine-3'-phosphorothioate
  modified_base 2: mod_base = OTHER; note = 2'-O-methyl-guanosine-3'-phosphorothioate
  modified_base 3: mod_base = OTHER; note = 2'-O-methyl-cytidine-3'-phosphate
  modified_base 4: mod_base = OTHER; note = 2'-O-methyl-uridine-3'-phosphate
  modified_base 5: mod_base = OTHER; note = 2'-deoxy-2'-fluoro-cytidine-3'-phosphate
  modified_base 6: mod_base = OTHER; note = 2'-O-methyl-adenosine-3'-phosphate
  modified_base 7: mod_base = OTHER; note = 2'-deoxy-2'-fluoro-guanosine-3'-phosphate
  modified_base 8: mod_base = OTHER; note = 2'-deoxy-2'-fluoro-cytidine-3'-phosphate
  modified_base 9: mod_base = OTHER; note = 2'-deoxy-2'-fluoro-uridine-3'-phosphate
  modified_base 10: mod_base = OTHER; note = 2'-O-methyl-adenosine-3'-phosphate
  modified_base 11: mod_base = OTHER; note = 2'-O-methyl-uridine-3'-phosphate
  modified_base 12: mod_base = OTHER; note = 2'-O-methyl-adenosine-3'-phosphate
  modified_base 13: mod_base = OTHER; note = 2'-O-methyl-adenosine-3'-phosphate
  modified_base 14: mod_base = OTHER; note = 2'-O-methyl-guanosine-3'-phosphate
  modified_base 15: mod_base = OTHER; note = 2'-O-methyl-adenosine-3'-phosphate
  modified_base 16: mod_base = OTHER; note = 2'-O-methyl-adenosine-3'-phosphate
  modified_base 17: mod_base = OTHER; note = 2'-O-methyl-guanosine-3'-phosphate
  modified_base 18: mod_base = OTHER; note = 2'-O-methyl-adenosine-3'-phosphate
  modified_base 19: mod_base = OTHER; note = 2'-O-methyl-guanosine-3'-phosphate
cgctcagctataagaagag

SEQ ID NO: 1265 - RNA, 19 nt, synthetic construct
  source 1..19: mol_type = other RNA
  modified_base 1: mod_base = OTHER; note = 2'-O-methyl-cytidine-3'-phosphorothioate
  modified_base 2: mod_base = OTHER; note = 2'-O-methyl-uridine-3'-phosphorothioate
  modified_base 3: mod_base = OTHER; note = 2'-O-methyl-guanosine-3'-phosphate
  modified_base 4: mod_base = OTHER; note = 2'-O-methyl-uridine-3'-phosphate
  modified_base 5: mod_base = OTHER; note = 2'-deoxy-2'-fluoro-adenosine-3'-phosphate
  modified_base 6: mod_base = OTHER; note = 2'-O-methyl-uridine-3'-phosphate
  modified_base 7: mod_base = OTHER; note = 2'-deoxy-2'-fluoro-cytidine-3'-phosphate
  modified_base 8: mod_base = OTHER; note = 2'-deoxy-2'-fluoro-adenosine-3'-phosphate
  modified_base 9: mod_base = OTHER; note = 2'-deoxy-2'-fluoro-uridine-3'-phosphate
  modified_base 10: mod_base = OTHER; note = 2'-O-methyl-cytidine-3'-phosphate
  modified_base 11: mod_base = OTHER; note = 2'-O-methyl-guanosine-3'-phosphate
  modified_base 12: mod_base = OTHER; note = 2'-O-methyl-uridine-3'-phosphate
  modified_base 13: mod_base = OTHER; note = 2'-O-methyl-guanosine-3'-phosphate
  modified_base 14: mod_base = OTHER; note = 2'-O-methyl-adenosine-3'-phosphate
  modified_base 15: mod_base = OTHER; note = 2'-O-methyl-uridine-3'-phosphate
  modified_base 16: mod_base = OTHER; note = 2'-O-methyl-guanosine-3'-phosphate
  modified_base 17: mod_base = OTHER; note = 2'-O-methyl-cytidine-3'-phosphate
  modified_base 18: mod_base = OTHER; note = 2'-O-methyl-uridine-3'-phosphate
  modified_base 19: mod_base = OTHER; note = 2'-O-methyl-uridine-3'-phosphate
ctgtatcatcgtgatgctt

SEQ ID NO: 1266 - RNA, 19 nt, synthetic construct
  source 1..19: mol_type = other RNA
  modified_base 1: mod_base = OTHER; note = 2'-O-methyl-uridine-3'-phosphorothioate
  modified_base 2: mod_base = OTHER; note = 2'-O-methyl-guanosine-3'-phosphorothioate
  modified_base 3: mod_base = OTHER; note = 2'-O-methyl-uridine-3'-phosphate
  modified_base 4: mod_base = OTHER; note = 2'-O-methyl-adenosine-3'-phosphate
  modified_base 5: mod_base = OTHER; note = 2'-deoxy-2'-fluoro-uridine-3'-phosphate
  modified_base 6: mod_base = OTHER; note = 2'-O-methyl-cytidine-3'-phosphate
  modified_base 7: mod_base = OTHER; note = 2'-deoxy-2'-fluoro-adenosine-3'-phosphate
  modified_base 8: mod_base = OTHER; note = 2'-deoxy-2'-fluoro-uridine-3'-phosphate
  modified_base 9: mod_base = OTHER; note = 2'-deoxy-2'-fluoro-cytidine-3'-phosphate
  modified_base 10: mod_base = OTHER; note = 2'-O-methyl-guanosine-3'-phosphate
  modified_base 11: mod_base = OTHER; note = 2'-O-methyl-uridine-3'-phosphate
  modified_base 12: mod_base = OTHER; note = 2'-O-methyl-guanosine-3'-phosphate
  modified_base 13: mod_base = OTHER; note = 2'-O-methyl-adenosine-3'-phosphate
  modified_base 14: mod_base = OTHER; note = 2'-O-methyl-uridine-3'-phosphate
  modified_base 15: mod_base = OTHER; note = 2'-O-methyl-guanosine-3'-phosphate
  modified_base 16: mod_base = OTHER; note = 2'-O-methyl-cytidine-3'-phosphate
  modified_base 17: mod_base = OTHER; note = 2'-O-methyl-uridine-3'-phosphate
  modified_base 18: mod_base = OTHER; note = 2'-O-methyl-uridine-3'-phosphate
  modified_base 19: mod_base = OTHER; note = 2'-O-methyl-cytidine-3'-phosphate
tgtatcatcgtgatgcttc

SEQ ID NO: 1267 - RNA, 19 nt, synthetic construct
  source 1..19: mol_type = other RNA
  modified_base 1: mod_base = OTHER; note = 2'-O-methyl-guanosine-3'-phosphorothioate
  modified_base 2: mod_base = OTHER; note = 2'-O-methyl-uridine-3'-phosphorothioate
  modified_base 3: mod_base = OTHER; note = 2'-O-methyl-cytidine-3'-phosphate
  modified_base 4: mod_base = OTHER; note = 2'-O-methyl-adenosine-3'-phosphate
  modified_base 5: mod_base = OTHER; note = 2'-deoxy-2'-fluoro-uridine-3'-phosphate
  modified_base 6: mod_base = OTHER; note = 2'-O-methyl-adenosine-3'-phosphate
  modified_base 7: mod_base = OTHER; note = 2'-deoxy-2'-fluoro-uridine-3'-phosphate
  modified_base 8: mod_base = OTHER; note = 2'-deoxy-2'-fluoro-cytidine-3'-phosphate
  modified_base 9: mod_base = OTHER; note = 2'-deoxy-2'-fluoro-adenosine-3'-phosphate
  modified_base 10: mod_base = OTHER; note = 2'-O-methyl-cytidine-3'-phosphate
  modified_base 11: mod_base = OTHER; note = 2'-O-methyl-uridine-3'-phosphate
  modified_base 12: mod_base = OTHER; note = 2'-O-methyl-adenosine-3'-phosphate
  modified_base 13: mod_base = OTHER; note = 2'-O-methyl-adenosine-3'-phosphate
  modified_base 14: mod_base = OTHER; note = 2'-O-methyl-uridine-3'-phosphate
  modified_base 15: mod_base = OTHER; note = 2'-O-methyl-adenosine-3'-phosphate
  modified_base 16: mod_base = OTHER; note = 2'-O-methyl-uridine-3'-phosphate
  modified_base 17: mod_base = OTHER; note = 2'-O-methyl-adenosine-3'-phosphate
  modified_base 18: mod_base = OTHER; note = 2'-O-methyl-cytidine-3'-phosphate
  modified_base 19: mod_base = OTHER; note = 2'-O-methyl-uridine-3'-phosphate
gtcatatcactaatatact

SEQ ID NO: 1268 - RNA, 19 nt, synthetic construct
  source 1..19: mol_type = other RNA
  modified_base 1: mod_base = OTHER; note = 2'-O-methyl-adenosine-3'-phosphorothioate
  modified_base 2: mod_base = OTHER; note = 2'-O-methyl-guanosine-3'-phosphorothioate
  modified_base 3: mod_base = OTHER; note = 2'-O-methyl-uridine-3'-phosphate
  modified_base 4: mod_base = OTHER; note = 2'-O-methyl-uridine-3'-phosphate
  modified_base 5: mod_base = OTHER; note = 2'-deoxy-2'-fluoro-adenosine-3'-phosphate
  modified_base 6: mod_base = OTHER; note = 2'-O-methyl-cytidine-3'-phosphate
  modified_base 7: mod_base = OTHER; note = 2'-deoxy-2'-fluoro-cytidine-3'-phosphate
  modified_base 8: mod_base = OTHER; note = 2'-deoxy-2'-fluoro-uridine-3'-phosphate
  modified_base 9: mod_base = OTHER; note = 2'-deoxy-2'-fluoro-adenosine-3'-phosphate
  modified_base 10: mod_base = OTHER; note = 2'-O-methyl-guanosine-3'-phosphate
  modified_base 11: mod_base = OTHER; note = 2'-O-methyl-cytidine-3'-phosphate
  modified_base 12: mod_base = OTHER; note = 2'-O-methyl-uridine-3'-phosphate
  modified_base 13: mod_base = OTHER; note = 2'-O-methyl-uridine-3'-phosphate
  modified_base 14: mod_base = OTHER; note = 2'-O-methyl-adenosine-3'-phosphate
  modified_base 15: mod_base = OTHER; note = 2'-O-methyl-cytidine-3'-phosphate
  modified_base 16: mod_base = OTHER; note = 2'-O-methyl-cytidine-3'-phosphate
  modified_base 17: mod_base = OTHER; note = 2'-O-methyl-adenosine-3'-phosphate
  modified_base 18: mod_base = OTHER; note = 2'-O-methyl-uridine-3'-phosphate
  modified_base 19: mod_base = OTHER; note = 2'-O-methyl-adenosine-3'-phosphate
agttacctagcttaccata

SEQ ID NO: 1269 - RNA, 19 nt, synthetic construct
  source 1..19: mol_type = other RNA
  modified_base 1: mod_base = OTHER; note = 2'-O-methyl-uridine-3'-phosphorothioate
  modified_base 2: mod_base = OTHER; note = 2'-O-methyl-cytidine-3'-phosphorothioate
  modified_base 3: mod_base = OTHER; note = 2'-O-methyl-uridine-3'-phosphate
  modified_base 4: mod_base = OTHER; note = 2'-O-methyl-uridine-3'-phosphate
  modified_base 5: mod_base = OTHER; note = 2'-deoxy-2'-fluoro-adenosine-3'-phosphate
  modified_base 6: mod_base = OTHER; note = 2'-O-methyl-adenosine-3'-phosphate
  modified_base 7: mod_base = OTHER; note = 2'-deoxy-2'-fluoro-cytidine-3'-phosphate
  modified_base 8: mod_base = OTHER; note = 2'-deoxy-2'-fluoro-uridine-3'-phosphate
  modified_base 9: mod_base = OTHER; note = 2'-deoxy-2'-fluoro-adenosine-3'-phosphate
  modified_base 10: mod_base = OTHER; note = 2'-O-methyl-cytidine-3'-phosphate
  modified_base 11: mod_base = OTHER; note = 2'-O-methyl-cytidine-3'-phosphate
  modified_base 12: mod_base = OTHER; note = 2'-O-methyl-uridine-3'-phosphate
  modified_base 13: mod_base = OTHER; note = 2'-O-methyl-adenosine-3'-phosphate
  modified_base 14: mod_base = OTHER; note = 2'-O-methyl-adenosine-3'-phosphate
  modified_base 15: mod_base = OTHER; note = 2'-O-methyl-uridine-3'-phosphate
  modified_base 16: mod_base = OTHER; note = 2'-O-methyl-adenosine-3'-phosphate
  modified_base 17: mod_base = OTHER; note = 2'-O-methyl-guanosine-3'-phosphate
  modified_base 18: mod_base = OTHER; note = 2'-O-methyl-cytidine-3'-phosphate
  modified_base 19: mod_base = OTHER; note = 2'-O-methyl-cytidine-3'-phosphate
tcttaactacctaatagcc

SEQ ID NO: 1270 - RNA, 19 nt, synthetic construct
  source 1..19: mol_type = other RNA
  modified_base 1: mod_base = OTHER; note = 2'-O-methyl-cytidine-3'-phosphorothioate
  modified_base 2: mod_base = OTHER; note = 2'-O-methyl-uridine-3'-phosphorothioate
  modified_base 3: mod_base = OTHER; note = 2'-O-methyl-uridine-3'-phosphate
  modified_base 4: mod_base = OTHER; note = 2'-O-methyl-adenosine-3'-phosphate
  modified_base 5: mod_base = OTHER; note = 2'-deoxy-2'-fluoro-adenosine-3'-phosphate
  modified_base 6: mod_base = OTHER; note = 2'-O-methyl-cytidine-3'-phosphate
  modified_base 7: mod_base = OTHER; note = 2'-deoxy-2'-fluoro-uridine-3'-phosphate
  modified_base 8: mod_base = OTHER; note = 2'-deoxy-2'-fluoro-adenosine-3'-phosphate
  modified_base 9: mod_base = OTHER; note = 2'-deoxy-2'-fluoro-cytidine-3'-phosphate
  modified_base 10: mod_base = OTHER; note = 2'-O-methyl-cytidine-3'-phosphate
  modified_base 11: mod_base = OTHER; note = 2'-O-methyl-uridine-3'-phosphate
  modified_base 12: mod_base = OTHER; note = 2'-O-methyl-adenosine-3'-phosphate
  modified_base 13: mod_base = OTHER; note = 2'-O-methyl-adenosine-3'-phosphate
  modified_base 14: mod_base = OTHER; note = 2'-O-methyl-uridine-3'-phosphate
  modified_base 15: mod_base = OTHER; note = 2'-O-methyl-adenosine-3'-phosphate
  modified_base 16: mod_base = OTHER; note = 2'-O-methyl-guanosine-3'-phosphate
  modified_base 17: mod_base = OTHER; note = 2'-O-methyl-cytidine-3'-phosphate
  modified_base 18: mod_base = OTHER; note = 2'-O-methyl-cytidine-3'-phosphate
  modified_base 19: mod_base = OTHER; note = 2'-O-methyl-uridine-3'-phosphate
cttaactacctaatagcct

SEQ ID NO: 1271 - RNA, 19 nt, synthetic construct
  source 1..19: mol_type = other RNA
  modified_base 1: mod_base = OTHER; note = 2'-O-methyl-cytidine-3'-phosphorothioate
  modified_base 2: mod_base = OTHER; note = 2'-O-methyl-uridine-3'-phosphorothioate
  modified_base 3: mod_base = OTHER; note = 2'-O-methyl-cytidine-3'-phosphate
  modified_base 4: mod_base = OTHER; note = 2'-O-methyl-uridine-3'-phosphate
  modified_base 5: mod_base = OTHER; note = 2'-deoxy-2'-fluoro-adenosine-3'-phosphate
  modified_base 6: mod_base = OTHER; note = 2'-O-methyl-uridine-3'-phosphate
  modified_base 7: mod_base = OTHER; note = 2'-deoxy-2'-fluoro-cytidine-3'-phosphate
  modified_base 8: mod_base = OTHER; note = 2'-deoxy-2'-fluoro-adenosine-3'-phosphate
  modified_base 9: mod_base = OTHER; note = 2'-deoxy-2'-fluoro-adenosine-3'-phosphate
  modified_base 10: mod_base = OTHER; note = 2'-O-methyl-cytidine-3'-phosphate
  modified_base 11: mod_base = OTHER; note = 2'-O-methyl-cytidine-3'-phosphate
  modified_base 12: mod_base = OTHER; note = 2'-O-methyl-adenosine-3'-phosphate
  modified_base 13: mod_base = OTHER; note = 2'-O-methyl-adenosine-3'-phosphate
  modified_base 14: mod_base = OTHER; note = 2'-O-methyl-adenosine-3'-phosphate
  modified_base 15: mod_base = OTHER; note = 2'-O-methyl-uridine-3'-phosphate
  modified_base 16: mod_base = OTHER; note = 2'-O-methyl-guanosine-3'-phosphate
  modified_base 17: mod_base = OTHER; note = 2'-O-methyl-guanosine-3'-phosphate
  modified_base 18: mod_base = OTHER; note = 2'-O-methyl-uridine-3'-phosphate
  modified_base 19: mod_base = OTHER; note = 2'-O-methyl-adenosine-3'-phosphate
ctctatcaaccaaatggta

SEQ ID NO: 1272 - RNA, 19 nt, synthetic construct
  source 1..19: mol_type = other RNA
  modified_base 1: mod_base = OTHER; note = 2'-O-methyl-cytidine-3'-phosphorothioate
  modified_base 2: mod_base = OTHER; note = 2'-O-methyl-adenosine-3'-phosphorothioate
  modified_base 3: mod_base = OTHER; note = 2'-O-methyl-adenosine-3'-phosphate
  modified_base 4: mod_base = OTHER; note = 2'-O-methyl-cytidine-3'-phosphate
  modified_base 5: mod_base = OTHER; note = 2'-deoxy-2'-fluoro-cytidine-3'-phosphate
  modified_base 6: mod_base = OTHER; note = 2'-O-methyl-adenosine-3'-phosphate
  modified_base 7: mod_base = OTHER; note = 2'-deoxy-2'-fluoro-adenosine-3'-phosphate
  modified_base 8: mod_base = OTHER; note = 2'-deoxy-2'-fluoro-adenosine-3'-phosphate
  modified_base 9: mod_base = OTHER; note = 2'-deoxy-2'-fluoro-uridine-3'-phosphate
  modified_base 10: mod_base = OTHER; note = 2'-O-methyl-guanosine-3'-phosphate
  modified_base 11: mod_base = OTHER; note = 2'-O-methyl-guanosine-3'-phosphate
  modified_base 12: mod_base = OTHER; note = 2'-O-methyl-uridine-3'-phosphate
  modified_base 13: mod_base = OTHER; note = 2'-O-methyl-adenosine-3'-phosphate
  modified_base 14: mod_base = OTHER; note = 2'-O-methyl-adenosine-3'-phosphate
  modified_base 15: mod_base = OTHER; note = 2'-O-methyl-guanosine-3'-phosphate
  modified_base 16: mod_base = OTHER; note = 2'-O-methyl-cytidine-3'-phosphate
  modified_base 17: mod_base = OTHER; note = 2'-O-methyl-adenosine-3'-phosphate
  modified_base 18: mod_base = OTHER; note = 2'-O-methyl-uridine-3'-phosphate
  modified_base 19: mod_base = OTHER; note = 2'-O-methyl-cytidine-3'-phosphate
caaccaaatggtaagcatc

SEQ ID NO: 1273 - RNA, 19 nt, synthetic construct
  source 1..19: mol_type = other RNA
  modified_base 1: mod_base = OTHER; note = 2'-O-methyl-cytidine-3'-phosphorothioate
  modified_base 2: mod_base = OTHER; note = 2'-O-methyl-uridine-3'-phosphorothioate
  modified_base 3: mod_base = OTHER; note = 2'-O-methyl-cytidine-3'-phosphate
  modified_base 4: mod_base = OTHER; note = 2'-O-methyl-uridine-3'-phosphate
  modified_base 5: mod_base = OTHER; note = 2'-deoxy-2'-fluoro-adenosine-3'-phosphate
  modified_base 6: mod_base = OTHER; note = 2'-O-methyl-cytidine-3'-phosphate
  modified_base 7: mod_base = OTHER; note = 2'-deoxy-2'-fluoro-uridine-3'-phosphate
  modified_base 8: mod_base = OTHER; note = 2'-deoxy-2'-fluoro-guanosine-3'-phosphate
  modified_base 9: mod_base = OTHER; note = 2'-deoxy-2'-fluoro-adenosine-3'-phosphate
  modified_base 10: mod_base = OTHER; note = 2'-O-methyl-guanosine-3'-phosphate
  modified_base 11: mod_base = OTHER; note = 2'-O-methyl-cytidine-3'-phosphate
  modified_base 12: mod_base = OTHER; note = 2'-O-methyl-uridine-3'-phosphate
  modified_base 13: mod_base = OTHER; note = 2'-O-methyl-adenosine-3'-phosphate
  modified_base 14: mod_base = OTHER; note = 2'-O-methyl-adenosine-3'-phosphate
  modified_base 15: mod_base = OTHER; note = 2'-O-methyl-adenosine-3'-phosphate
  modified_base 16: mod_base = OTHER; note = 2'-O-methyl-uridine-3'-phosphate
  modified_base 17: mod_base = OTHER; note = 2'-O-methyl-uridine-3'-phosphate
  modified_base 18: mod_base = OTHER; note = 2'-O-methyl-adenosine-3'-phosphate
  modified_base 19: mod_base = OTHER; note = 2'-O-methyl-uridine-3'-phosphate
ctctactgagctaaattat

SEQ ID NO: 1274 - RNA, 19 nt, synthetic construct
  source 1..19: mol_type = other RNA
  modified_base 1: mod_base = OTHER; note = 2'-O-methyl-uridine-3'-phosphorothioate
  modified_base 2: mod_base = OTHER; note = 2'-O-methyl-cytidine-3'-phosphorothioate
  modified_base 3: mod_base = OTHER; note = 2'-O-methyl-uridine-3'-phosphate
  modified_base 4: mod_base = OTHER; note = 2'-O-methyl-adenosine-3'-phosphate
  modified_base 5: mod_base = OTHER; note = 2'-deoxy-2'-fluoro-cytidine-3'-phosphate
  modified_base 6: mod_base = OTHER; note = 2'-O-methyl-uridine-3'-phosphate
  modified_base 7: mod_base = OTHER; note = 2'-deoxy-2'-fluoro-guanosine-3'-phosphate
  modified_base 8: mod_base = OTHER; note = 2'-deoxy-2'-fluoro-adenosine-3'-phosphate
  modified_base 9: mod_base = OTHER; note = 2'-deoxy-2'-fluoro-guanosine-3'-phosphate
  modified_base 10: mod_base = OTHER; note = 2'-O-methyl-cytidine-3'-phosphate
  modified_base 11: mod_base = OTHER; note = 2'-O-methyl-uridine-3'-phosphate
  modified_base 12: mod_base = OTHER; note = 2'-O-methyl-adenosine-3'-phosphate
  modified_base 13: mod_base = OTHER; note = 2'-O-methyl-adenosine-3'-phosphate
  modified_base 14: mod_base = OTHER; note = 2'-O-methyl-adenosine-3'-phosphate
  modified_base 15: mod_base = OTHER; note = 2'-O-methyl-uridine-3'-phosphate
  modified_base 16: mod_base = OTHER; note = 2'-O-methyl-uridine-3'-phosphate
  modified_base 17: mod_base = OTHER; note = 2'-O-methyl-adenosine-3'-phosphate
  modified_base 18: mod_base = OTHER; note = 2'-O-methyl-uridine-3'-phosphate
  modified_base 19: mod_base = OTHER; note = 2'-O-methyl-adenosine-3'-phosphate
tctactgagctaaattata

SEQ ID NO: 1275 - RNA, 19 nt, synthetic construct
  source 1..19: mol_type = other RNA
  modified_base 1: mod_base = OTHER; note = 2'-O-methyl-guanosine-3'-phosphorothioate
  modified_base 2: mod_base = OTHER; note = 2'-O-methyl-cytidine-3'-phosphorothioate
  modified_base 3: mod_base = OTHER; note = 2'-O-methyl-uridine-3'-phosphate
  modified_base 4: mod_base = OTHER; note = 2'-O-methyl-adenosine-3'-phosphate
  modified_base 5: mod_base = OTHER; note = 2'-deoxy-2'-fluoro-adenosine-3'-phosphate
  modified_base 6: mod_base = OTHER; note = 2'-O-methyl-adenosine-3'-phosphate
  modified_base 7: mod_base = OTHER; note = 2'-deoxy-2'-fluoro-uridine-3'-phosphate
  modified_base 8: mod_base = OTHER; note = 2'-deoxy-2'-fluoro-uridine-3'-phosphate
  modified_base 9: mod_base = OTHER; note = 2'-deoxy-2'-fluoro-adenosine-3'-phosphate
  modified_base 10: mod_base = OTHER; note = 2'-O-methyl-uridine-3'-phosphate
  modified_base 11: mod_base = OTHER; note = 2'-O-methyl-adenosine-3'-phosphate
  modified_base 12: mod_base = OTHER; note = 2'-O-methyl-guanosine-3'-phosphate
  modified_base 13: mod_base = OTHER; note = 2'-O-methyl-adenosine-3'-phosphate
  modified_base 14: mod_base = OTHER; note = 2'-O-methyl-uridine-3'-phosphate
  modified_base 15: mod_base = OTHER; note = 2'-O-methyl-cytidine-3'-phosphate
  modified_base 16: mod_base = OTHER; note = 2'-O-methyl-cytidine-3'-phosphate
  modified_base 17: mod_base = OTHER; note = 2'-O-methyl-adenosine-3'-phosphate
  modified_base 18: mod_base = OTHER; note = 2'-O-methyl-guanosine-3'-phosphate
  modified_base 19: mod_base = OTHER; note = 2'-O-methyl-cytidine-3'-phosphate
gctaaattatagatccagc

SEQ ID NO: 1276 - RNA, 19 nt, synthetic construct
  source 1..19: mol_type = other RNA
  modified_base 1: mod_base = OTHER; note = 2'-O-methyl-adenosine-3'-phosphorothioate
  modified_base 2: mod_base = OTHER; note = 2'-O-methyl-cytidine-3'-phosphorothioate
  modified_base 3: mod_base = OTHER; note = 2'-O-methyl-adenosine-3'-phosphate
  modified_base 4: mod_base = OTHER; note = 2'-O-methyl-cytidine-3'-phosphate
  modified_base 5: mod_base = OTHER; note = 2'-deoxy-2'-fluoro-adenosine-3'-phosphate
  modified_base 6: mod_base = OTHER; note = 2'-O-methyl-adenosine-3'-phosphate
  modified_base 7: mod_base = OTHER; note = 2'-deoxy-2'-fluoro-guanosine-3'-phosphate
  modified_base 8: mod_base = OTHER; note = 2'-deoxy-2'-fluoro-uridine-3'-phosphate
  modified_base 9: mod_base = OTHER; note = 2'-deoxy-2'-fluoro-guanosine-3'-phosphate
  modified_base 10: mod_base = OTHER; note = 2'-O-methyl-uridine-3'-phosphate
  modified_base 11: mod_base = OTHER; note = 2'-O-methyl-uridine-3'-phosphate
  modified_base 12: mod_base = OTHER; note = 2'-O-methyl-guanosine-3'-phosphate
  modified_base 13: mod_base = OTHER; note = 2'-O-methyl-cytidine-3'-phosphate
  modified_base 14: mod_base = OTHER; note = 2'-O-methyl-uridine-3'-phosphate
  modified_base 15: mod_base = OTHER; note = 2'-O-methyl-adenosine-3'-phosphate
  modified_base 16: mod_base = OTHER; note = 2'-O-methyl-adenosine-3'-phosphate
  modified_base 17: mod_base = OTHER; note = 2'-O-methyl-cytidine-3'-phosphate
  modified_base 18: mod_base = OTHER; note = 2'-O-methyl-uridine-3'-phosphate
  modified_base 19: mod_base = OTHER; note = 2'-O-methyl-cytidine-3'-phosphate
acacaagtgttgctaactc

SEQ ID NO: 1277 - RNA, 19 nt, synthetic construct
  source 1..19: mol_type = other RNA
  modified_base 1: mod_base = OTHER; note = 2'-O-methyl-guanosine-3'-phosphorothioate
  modified_base 2: mod_base = OTHER; note = 2'-O-methyl-uridine-3'-phosphorothioate
  modified_base 3: mod_base = OTHER; note = 2'-O-methyl-uridine-3'-phosphate
  modified_base 4: mod_base = OTHER; note = 2'-O-methyl-guanosine-3'-phosphate
  modified_base 5: mod_base = OTHER; note = 2'-deoxy-2'-fluoro-cytidine-3'-phosphate
  modified_base 6: mod_base = OTHER; note = 2'-O-methyl-uridine-3'-phosphate
  modified_base 7: mod_base = OTHER; note = 2'-deoxy-2'-fluoro-adenosine-3'-phosphate
  modified_base 8: mod_base = OTHER; note = 2'-deoxy-2'-fluoro-adenosine-3'-phosphate
  modified_base 9: mod_base = OTHER; note = 2'-deoxy-2'-fluoro-cytidine-3'-phosphate
  modified_base 10: mod_base = OTHER; note = 2'-O-methyl-uridine-3'-phosphate
  modified_base 11: mod_base = OTHER; note = 2'-O-methyl-cytidine-3'-phosphate
  modified_base 12: mod_base = OTHER; note = 2'-O-methyl-adenosine-3'-phosphate
  modified_base 13: mod_base = OTHER; note = 2'-O-methyl-adenosine-3'-phosphate
  modified_base 14: mod_base = OTHER; note = 2'-O-methyl-uridine-3'-phosphate
  modified_base 15: mod_base = OTHER; note = 2'-O-methyl-adenosine-3'-phosphate
  modified_base 16: mod_base = OTHER; note = 2'-O-methyl-guanosine-3'-phosphate
  modified_base 17: mod_base = OTHER; note = 2'-O-methyl-uridine-3'-phosphate
  modified_base 18: mod_base = OTHER; note = 2'-O-methyl-guanosine-3'-phosphate
  modified_base 19: mod_base = OTHER; note = 2'-O-methyl-adenosine-3'-phosphate
gttgctaactcaatagtga

SEQ ID NO: 1278 - RNA, 19 nt, synthetic construct
  source 1..19: mol_type = other RNA
  modified_base 1: mod_base = OTHER; note = 2'-O-methyl-guanosine-3'-phosphorothioate
  modified_base 2: mod_base = OTHER; note = 2'-O-methyl-adenosine-3'-phosphorothioate
  modified_base 3: mod_base = OTHER; note = 2'-O-methyl-uridine-3'-phosphate
  modified_base 4: mod_base = OTHER; note = 2'-O-methyl-uridine-3'-phosphate
  modified_base 5: mod_base = OTHER; note = 2'-deoxy-2'-fluoro-uridine-3'-phosphate
  modified_base 6: mod_base = OTHER; note = 2'-O-methyl-cytidine-3'-phosphate
  modified_base 7: mod_base = OTHER; note = 2'-deoxy-2'-fluoro-uridine-3'-phosphate
  modified_base 8: mod_base = OTHER; note = 2'-deoxy-2'-fluoro-uridine-3'-phosphate
  modified_base 9: mod_base = OTHER; note = 2'-deoxy-2'-fluoro-adenosine-3'-phosphate
  modified_base 10: mod_base = OTHER; note = 2'-O-methyl-adenosine-3'-phosphate
  modified_base 11: mod_base = OTHER; note = 2'-O-methyl-guanosine-3'-phosphate
  modified_base 12: mod_base = OTHER; note = 2'-O-methyl-uridine-3'-phosphate
  modified_base 13: mod_base = OTHER; note = 2'-O-methyl-guanosine-3'-phosphate
  modified_base 14: mod_base = OTHER; note = 2'-O-methyl-adenosine-3'-phosphate
  modified_base 15: mod_base = OTHER; note = 2'-O-methyl-cytidine-3'-phosphate
  modified_base 16: mod_base = OTHER; note = 2'-O-methyl-guanosine-3'-phosphate
  modified_base 17: mod_base = OTHER; note = 2'-O-methyl-cytidine-3'-phosphate
  modified_base 18: mod_base = OTHER; note = 2'-O-methyl-cytidine-3'-phosphate
  modified_base 19: mod_base = OTHER; note = 2'-O-methyl-uridine-3'-phosphate
gatttcttaagtgacgcct

SEQ ID NO: 1279 - RNA, 19 nt, synthetic construct
  source 1..19: mol_type = other RNA
  modified_base 1: mod_base = OTHER; note = 2'-O-methyl-uridine-3'-phosphorothioate
  modified_base 2: mod_base = OTHER; note = 2'-O-methyl-cytidine-3'-phosphorothioate
  modified_base 3: mod_base = OTHER; note = 2'-O-methyl-uridine-3'-phosphate
  modified_base 4: mod_base = OTHER; note = 2'-O-methyl-uridine-3'-phosphate
  modified_base 5: mod_base = OTHER; note = 2'-deoxy-2'-fluoro-adenosine-3'-phosphate
  modified_base 6: mod_base = OTHER; note = 2'-O-methyl-adenosine-3'-phosphate
  modified_base 7: mod_base = OTHER; note = 2'-deoxy-2'-fluoro-guanosine-3'-phosphate
  modified_base 8: mod_base = OTHER; note = 2'-deoxy-2'-fluoro-uridine-3'-phosphate
  modified_base 9: mod_base = OTHER; note = 2'-deoxy-2'-fluoro-guanosine-3'-phosphate
  modified_base 10: mod_base = OTHER; note = 2'-O-methyl-adenosine-3'-phosphate
  modified_base 11: mod_base = OTHER; note = 2'-O-methyl-cytidine-3'-phosphate
  modified_base 12: mod_base = OTHER; note = 2'-O-methyl-guanosine-3'-phosphate
  modified_base 13: mod_base = OTHER; note = 2'-O-methyl-cytidine-3'-phosphate
  modified_base 14: mod_base = OTHER; note = 2'-O-methyl-cytidine-3'-phosphate
  modified_base 15: mod_base = OTHER; note = 2'-O-methyl-uridine-3'-phosphate
  modified_base 16: mod_base = OTHER; note = 2'-O-methyl-cytidine-3'-phosphate
  modified_base 17: mod_base = OTHER; note = 2'-O-methyl-adenosine-3'-phosphate
  modified_base 18: mod_base = OTHER; note = 2'-O-methyl-uridine-3'-phosphate
  modified_base 19: mod_base = OTHER; note = 2'-O-methyl-cytidine-3'-phosphate
tcttaagtgacgcctcatc

SEQ ID NO: 1280 - RNA, 19 nt, synthetic construct
  source 1..19: mol_type = other RNA
  modified_base 1: mod_base = OTHER; note = 2'-O-methyl-uridine-3'-phosphorothioate
  modified_base 2: mod_base = OTHER; note = 2'-O-methyl-uridine-3'-phosphorothioate
  modified_base 3: mod_base = OTHER; note = 2'-O-methyl-adenosine-3'-phosphate
  modified_base 4: mod_base = OTHER; note = 2'-O-methyl-adenosine-3'-phosphate
  modified_base 5: mod_base = OTHER; note = 2'-deoxy-2'-fluoro-guanosine-3'-phosphate
  modified_base 6: mod_base = OTHER; note = 2'-O-methyl-uridine-3'-phosphate
  modified_base 7: mod_base = OTHER; note = 2'-deoxy-2'-fluoro-guanosine-3'-phosphate
  modified_base 8: mod_base = OTHER; note = 2'-deoxy-2'-fluoro-adenosine-3'-phosphate
  modified_base 9: mod_base = OTHER; note = 2'-deoxy-2'-fluoro-cytidine-3'-phosphate
  modified_base 10: mod_base = OTHER; note = 2'-O-methyl-guanosine-3'-phosphate
  modified_base 11: mod_base = OTHER; note = 2'-O-methyl-cytidine-3'-phosphate
  modified_base 12: mod_base = OTHER; note = 2'-O-methyl-cytidine-3'-phosphate
  modified_base 13: mod_base = OTHER; note = 2'-O-methyl-uridine-3'-phosphate
  modified_base 14: mod_base = OTHER; note = 2'-O-methyl-cytidine-3'-phosphate
  modified_base 15: mod_base = OTHER; note = 2'-O-methyl-adenosine-3'-phosphate
  modified_base 16: mod_base = OTHER; note = 2'-O-methyl-uridine-3'-phosphate
  modified_base 17: mod_base = OTHER; note = 2'-O-methyl-cytidine-3'-phosphate
  modified_base 18: mod_base = OTHER; note = 2'-O-methyl-uridine-3'-phosphate
  modified_base 19: mod_base = OTHER; note = 2'-O-methyl-adenosine-3'-phosphate
ttaagtgacgcctcatcta

SEQ ID NO: 1281 - RNA, 19 nt, synthetic construct
  source 1..19: mol_type = other RNA
  modified_base 1: mod_base = OTHER; note = 2'-O-methyl-cytidine-3'-phosphorothioate
  modified_base 2: mod_base = OTHER; note = 2'-O-methyl-uridine-3'-phosphorothioate
  modified_base 3: mod_base = OTHER; note = 2'-O-methyl-adenosine-3'-phosphate
  modified_base 4: mod_base = OTHER; note = 2'-O-methyl-uridine-3'-phosphate
  modified_base 5: mod_base = OTHER; note = 2'-deoxy-2'-fluoro-adenosine-3'-phosphate
  modified_base 6: mod_base = OTHER; note = 2'-O-methyl-adenosine-3'-phosphate
  modified_base 7: mod_base = OTHER; note = 2'-deoxy-2'-fluoro-guanosine-3'-phosphate
  modified_base 8: mod_base = OTHER; note = 2'-deoxy-2'-fluoro-adenosine-3'-phosphate
  modified_base 9: mod_base = OTHER; note = 2'-deoxy-2'-fluoro-adenosine-3'-phosphate
  modified_base 10: mod_base = OTHER; note = 2'-O-methyl-guanosine-3'-phosphate
  modified_base 11: mod_base = OTHER; note = 2'-O-methyl-adenosine-3'-phosphate
  modified_base 12: mod_base = OTHER; note = 2'-O-methyl-guanosine-3'-phosphate
  modified_base 13: mod_base = OTHER; note = 2'-O-methyl-cytidine-3'-phosphate
  modified_base 14: mod_base = OTHER; note = 2'-O-methyl-cytidine-3'-phosphate
  modified_base 15: mod_base = OTHER; note = 2'-O-methyl-uridine-3'-phosphate
  modified_base 16: mod_base = OTHER; note = 2'-O-methyl-cytidine-3'-phosphate
  modified_base 17: mod_base = OTHER; note = 2'-O-methyl-adenosine-3'-phosphate
  modified_base 18: mod_base = OTHER; note = 2'-O-methyl-adenosine-3'-phosphate
  modified_base 19: mod_base = OTHER; note = 2'-O-methyl-cytidine-3'-phosphate
ctataagaagagcctcaac

SEQ ID NO: 1282 - RNA, 19 nt, synthetic construct
  source 1..19: mol_type = other RNA
  modified_base 1: mod_base = OTHER; note = 2'-O-methyl-uridine-3'-phosphorothioate
  modified_base 2: mod_base = OTHER; note = 2'-O-methyl-adenosine-3'-phosphorothioate
  modified_base 3: mod_base = OTHER; note = 2'-O-methyl-uridine-3'-phosphate
  modified_base 4: mod_base = OTHER; note = 2'-O-methyl-adenosine-3'-phosphate
  modified_base 5: mod_base = OTHER; note = 2'-deoxy-2'-fluoro-adenosine-3'-phosphate
  modified_base 6: mod_base = OTHER; note = 2'-O-methyl-guanosine-3'-phosphate
  modified_base 7: mod_base = OTHER; note = 2'-deoxy-2'-fluoro-adenosine-3'-phosphate
  modified_base 8: mod_base = OTHER; note = 2'-deoxy-2'-fluoro-adenosine-3'-phosphate
  modified_base 9: mod_base = OTHER; note = 2'-deoxy-2'-fluoro-guanosine-3'-phosphate
  modified_base 10: mod_base = OTHER; note = 2'-O-methyl-adenosine-3'-phosphate
  modified_base 11: mod_base = OTHER; note = 2'-O-methyl-guanosine-3'-phosphate
  modified_base 12: mod_base = OTHER; note = 2'-O-methyl-cytidine-3'-phosphate
  modified_base 13: mod_base = OTHER; note = 2'-O-methyl-cytidine-3'-phosphate
  modified_base 14: mod_base = OTHER; note = 2'-O-methyl-uridine-3'-phosphate
  modified_base 15: mod_base = OTHER; note = 2'-O-methyl-cytidine-3'-phosphate
  modified_base 16: mod_base = OTHER; note = 2'-O-methyl-adenosine-3'-phosphate
  modified_base 17: mod_base = OTHER; note = 2'-O-methyl-adenosine-3'-phosphate
  modified_base 18: mod_base = OTHER; note = 2'-O-methyl-cytidine-3'-phosphate
  modified_base 19: mod_base = OTHER; note = 2'-O-methyl-cytidine-3'-phosphate
tataagaagagcctcaacc

SEQ ID NO: 1283 - RNA, 19 nt, synthetic construct
  source 1..19: mol_type = other RNA
  modified_base 1: mod_base = OTHER; note = 2'-O-methyl-adenosine-3'-phosphorothioate
  modified_base 2: mod_base = OTHER; note = 2'-O-methyl-uridine-3'-phosphorothioate
  modified_base 3: mod_base = OTHER; note = 2'-O-methyl-adenosine-3'-phosphate
  modified_base 4: mod_base = OTHER; note = 2'-O-methyl-adenosine-3'-phosphate
  modified_base 5: mod_base = OTHER; note = 2'-deoxy-2'-fluoro-guanosine-3'-phosphate
  modified_base 6: mod_base = OTHER; note = 2'-O-methyl-adenosine-3'-phosphate
  modified_base 7: mod_base = OTHER; note = 2'-deoxy-2'-fluoro-adenosine-3'-phosphate
  modified_base 8: mod_base = OTHER; note = 2'-deoxy-2'-fluoro-guanosine-3'-phosphate
  modified_base 9: mod_base = OTHER; note = 2'-deoxy-2'-fluoro-adenosine-3'-phosphate
  modified_base 10: mod_base = OTHER; note = 2'-O-methyl-guanosine-3'-phosphate
  modified_base 11: mod_base = OTHER; note = 2'-O-methyl-cytidine-3'-phosphate
  modified_base 12: mod_base = OTHER; note = 2'-O-methyl-cytidine-3'-phosphate
  modified_base 13: mod_base = OTHER; note = 2'-O-methyl-uridine-3'-phosphate
  modified_base 14: mod_base = OTHER; note = 2'-O-methyl-cytidine-3'-phosphate
  modified_base 15: mod_base = OTHER; note = 2'-O-methyl-adenosine-3'-phosphate
  modified_base 16: mod_base = OTHER; note = 2'-O-methyl-adenosine-3'-phosphate
  modified_base 17: mod_base = OTHER; note = 2'-O-methyl-cytidine-3'-phosphate
  modified_base 18: mod_base = OTHER; note = 2'-O-methyl-cytidine-3'-phosphate
  modified_base 19: mod_base = OTHER; note = 2'-O-methyl-adenosine-3'-phosphate
ataagaagagcctcaacca

SEQ ID NO: 1284 - RNA, 19 nt, synthetic construct
  source 1..19: mol_type = other RNA
  modified_base 1: mod_base = OTHER; note = 2'-O-methyl-adenosine-3'-phosphorothioate
  modified_base 2: mod_base = OTHER; note = 2'-O-methyl-cytidine-3'-phosphorothioate
  modified_base 3: mod_base = OTHER; note = 2'-O-methyl-adenosine-3'-phosphate
  modified_base 4: mod_base = OTHER; note = 2'-O-methyl-adenosine-3'-phosphate
  modified_base 5: mod_base = OTHER; note = 2'-deoxy-2'-fluoro-guanosine-3'-phosphate
  modified_base 6: mod_base = OTHER; note = 2'-O-methyl-cytidine-3'-phosphate
  modified_base 7: mod_base = OTHER; note = 2'-deoxy-2'-fluoro-adenosine-3'-phosphate
  modified_base 8: mod_base = OTHER; note = 2'-deoxy-2'-fluoro-cytidine-3'-phosphate
  modified_base 9: mod_base = OTHER; note = 2'-deoxy-2'-fluoro-guanosine-3'-phosphate
  modified_base 10: mod_base = OTHER; note = 2'-O-methyl-uridine-3'-phosphate
  modified_base 11: mod_base = OTHER; note = 2'-O-methyl-cytidine-3'-phosphate
  modified_base 12: mod_base = OTHER; note = 2'-O-methyl-adenosine-3'-phosphate
  modified_base 13: mod_base = OTHER; note = 2'-O-methyl-adenosine-3'-phosphate
  modified_base 14: mod_base = OTHER; note = 2'-O-methyl-adenosine-3'-phosphate
  modified_base 15: mod_base = OTHER; note = 2'-O-methyl-adenosine-3'-phosphate
  modified_base 16: mod_base = OTHER; note = 2'-O-methyl-guanosine-3'-phosphate
  modified_base 17: mod_base = OTHER; note = 2'-O-methyl-cytidine-3'-phosphate
  modified_base 18: mod_base = OTHER; note = 2'-O-methyl-uridine-3'-phosphate
  modified_base 19: mod_base = OTHER; note = 2'-O-methyl-adenosine-3'-phosphate
acaagcacgtcaaaagcta

SEQ ID NO: 1285 - RNA, 19 nt, synthetic construct
  source 1..19: mol_type = other RNA
  modified_base 1: mod_base = OTHER; note = 2'-O-methyl-cytidine-3'-phosphorothioate
  modified_base 2: mod_base = OTHER; note = 2'-O-methyl-uridine-3'-phosphorothioate
  modified_base 3: mod_base = OTHER; note = 2'-O-methyl-adenosine-3'-phosphate
  modified_base 4: mod_base = OTHER; note = 2'-O-methyl-cytidine-3'-phosphate
  modified_base 5: mod_base = OTHER; note = 2'-deoxy-2'-fluoro-adenosine-3'-phosphate
  modified_base 6: mod_base = OTHER; note = 2'-O-methyl-guanosine-3'-phosphate
  modified_base 7: mod_base = OTHER; note = 2'-deoxy-2'-fluoro-adenosine-3'-phosphate
  modified_base 8: mod_base = OTHER; note = 2'-deoxy-2'-fluoro-adenosine-3'-phosphate
  modified_base 9: mod_base = OTHER; note = 2'-deoxy-2'-fluoro-uridine-3'-phosphate
  modified_base 10: mod_base = OTHER; note = 2'-O-methyl-cytidine-3'-phosphate
  modified_base 11: mod_base = OTHER; note = 2'-O-methyl-uridine-3'-phosphate
  modified_base 12: mod_base = OTHER; note = 2'-O-methyl-adenosine-3'-phosphate
  modified_base 13: mod_base = OTHER; note = 2'-O-methyl-uridine-3'-phosphate
  modified_base 14: mod_base = OTHER; note = 2'-O-methyl-uridine-3'-phosphate
  modified_base 15: mod_base = OTHER; note = 2'-O-methyl-uridine-3'-phosphate
  modified_base 16: mod_base = OTHER; note = 2'-O-methyl-adenosine-3'-phosphate
  modified_base 17: mod_base = OTHER; note = 2'-O-methyl-uridine-3'-phosphate
  modified_base 18: mod_base = OTHER; note = 2'-O-methyl-cytidine-3'-phosphate
  modified_base 19: mod_base = OTHER; note = 2'-O-methyl-adenosine-3'-phosphate
ctacagaatctatttatca

SEQ ID NO: 1286 - RNA, 19 nt, synthetic construct
  source 1..19: mol_type = other RNA
  modified_base 1: mod_base = OTHER; note = 2'-O-methyl-adenosine-3'-phosphorothioate
  modified_base 2: mod_base = OTHER; note = 2'-O-methyl-adenosine-3'-phosphorothioate
  modified_base 3: mod_base = OTHER; note = 2'-O-methyl-adenosine-3'-phosphate
  modified_base 4: mod_base = OTHER; note = 2'-O-methyl-adenosine-3'-phosphate
  modified_base 5: mod_base = OTHER; note = 2'-deoxy-2'-fluoro-cytidine-3'-phosphate
  modified_base 6: mod_base = OTHER; note = 2'-O-methyl-uridine-3'-phosphate
  modified_base 7: mod_base = OTHER; note = 2'-deoxy-2'-fluoro-guanosine-3'-phosphate
  modified_base 8: mod_base = OTHER; note = 2'-deoxy-2'-fluoro-cytidine-3'-phosphate
  modified_base 9: mod_base = OTHER; note = 2'-deoxy-2'-fluoro-adenosine-3'-phosphate
  modified_base 10: mod_base = OTHER; note = 2'-O-methyl-cytidine-3'-phosphate
  modified_base 11: mod_base = OTHER; note = 2'-O-methyl-uridine-3'-phosphate
  modified_base 12: mod_base = OTHER; note = 2'-O-methyl-guanosine-3'-phosphate
  modified_base 13: mod_base = OTHER; note = 2'-O-methyl-cytidine-3'-phosphate
  modified_base 14: mod_base = OTHER; note = 2'-O-methyl-cytidine-3'-phosphate
  modified_base 15: mod_base = OTHER; note = 2'-O-methyl-adenosine-3'-phosphate
  modified_base 16: mod_base = OTHER; note = 2'-O-methyl-adenosine-3'-phosphate
  modified_base 17: mod_base = OTHER; note = 2'-O-methyl-cytidine-3'-phosphate
  modified_base 18: mod_base = OTHER; note = 2'-O-methyl-adenosine-3'-phosphate
  modified_base 19: mod_base = OTHER; note = 2'-O-methyl-adenosine-3'-phosphate
aaaactgcactgccaacaa

SEQ ID NO: 1287 - RNA, 19 nt, synthetic construct
  source 1..19: mol_type = other RNA
  modified_base 1: mod_base = OTHER; note = 2'-O-methyl-adenosine-3'-phosphorothioate
  modified_base 2: mod_base = OTHER; note = 2'-O-methyl-adenosine-3'-phosphorothioate
  modified_base 3: mod_base = OTHER; note = 2'-O-methyl-adenosine-3'-phosphate
  modified_base 4: mod_base = OTHER; note = 2'-O-methyl-cytidine-3'-phosphate
  modified_base 5: mod_base = OTHER; note = 2'-deoxy-2'-fluoro-uridine-3'-phosphate
  modified_base 6: mod_base = OTHER; note = 2'-O-methyl-guanosine-3'-phosphate
  modified_base 7: mod_base = OTHER; note = 2'-deoxy-2'-fluoro-cytidine-3'-phosphate
  modified_base 8: mod_base = OTHER; note = 2'-deoxy-2'-fluoro-adenosine-3'-phosphate
  modified_base 9: mod_base = OTHER; note = 2'-deoxy-2'-fluoro-cytidine-3'-phosphate
  modified_base 10: mod_base = OTHER; note = 2'-O-methyl-uridine-3'-phosphate
  modified_base 11: mod_base = OTHER; note = 2'-O-methyl-guanosine-3'-phosphate
  modified_base 12: mod_base = OTHER; note = 2'-O-methyl-cytidine-3'-phosphate
  modified_base 13: mod_base = OTHER; note = 2'-O-methyl-cytidine-3'-phosphate
  modified_base 14: mod_base = OTHER; note = 2'-O-methyl-adenosine-3'-phosphate
  modified_base 15: mod_base = OTHER; note = 2'-O-methyl-adenosine-3'-phosphate
  modified_base 16: mod_base = OTHER; note = 2'-O-methyl-cytidine-3'-phosphate
  modified_base 17: mod_base = OTHER; note = 2'-O-methyl-adenosine-3'-phosphate
  modified_base 18: mod_base = OTHER; note = 2'-O-methyl-adenosine-3'-phosphate
  modified_base 19: mod_base = OTHER; note = 2'-O-methyl-guanosine-3'-phosphate
aaactgcactgccaacaag

SEQ ID NO: 1288 - RNA, 19 nt, synthetic construct
  source 1..19: mol_type = other RNA
  modified_base 1: mod_base = OTHER; note = 2'-O-methyl-uridine-3'-phosphorothioate
  modified_base 2: mod_base = OTHER; note = 2'-O-methyl-guanosine-3'-phosphorothioate
  modified_base 3: mod_base = OTHER; note = 2'-O-methyl-adenosine-3'-phosphate
  modified_base 4: mod_base = OTHER; note = 2'-O-methyl-guanosine-3'-phosphate
  modified_base 5: mod_base = OTHER; note = 2'-deoxy-2'-fluoro-adenosine-3'-phosphate
  modified_base 6: mod_base = OTHER; note = 2'-O-methyl-adenosine-3'-phosphate
  modified_base 7: mod_base = OTHER; note = 2'-deoxy-2'-fluoro-uridine-3'-phosphate
  modified_base 8: mod_base = OTHER; note = 2'-deoxy-2'-fluoro-cytidine-3'-phosphate
  modified_base 9: mod_base = OTHER; note = 2'-deoxy-2'-fluoro-adenosine-3'-phosphate
  modified_base 10: mod_base = OTHER; note = 2'-O-methyl-adenosine-3'-phosphate
  modified_base 11: mod_base = OTHER; note = 2'-O-methyl-guanosine-3'-phosphate
  modified_base 12: mod_base = OTHER; note = 2'-O-methyl-uridine-3'-phosphate
  modified_base 13: mod_base = OTHER; note = 2'-O-methyl-adenosine-3'-phosphate
  modified_base 14: mod_base = OTHER; note = 2'-O-methyl-uridine-3'-phosphate
  modified_base 15: mod_base = OTHER; note = 2'-O-methyl-guanosine-3'-phosphate
  modified_base 16: mod_base = OTHER; note = 2'-O-methyl-guanosine-3'-phosphate
  modified_base 17: mod_base = OTHER; note = 2'-O-methyl-adenosine-3'-phosphate
  modified_base 18: mod_base = OTHER; note = 2'-O-methyl-adenosine-3'-phosphate
  modified_base 19: mod_base = OTHER; note = 2'-O-methyl-adenosine-3'-phosphate
tgagaatcaagtatggaaa

SEQ ID NO: 1289 - RNA, 19 nt, synthetic construct
  source 1..19: mol_type = other RNA
  modified_base 1: mod_base = OTHER; note = 2'-O-methyl-adenosine-3'-phosphorothioate
  modified_base 2: mod_base = OTHER; note = 2'-O-methyl-adenosine-3'-phosphorothioate
  modified_base 3: mod_base = OTHER; note = 2'-O-methyl-cytidine-3'-phosphate
  modified_base 4: mod_base = OTHER; note = 2'-O-methyl-uridine-3'-phosphate
  modified_base 5: mod_base = OTHER; note = 2'-deoxy-2'-fluoro-guanosine-3'-phosphate
  modified_base 6: mod_base = OTHER; note = 2'-O-methyl-guanosine-3'-phosphate
  modified_base 7: mod_base = OTHER; note = 2'-deoxy-2'-fluoro-uridine-3'-phosphate
  modified_base 8: mod_base = OTHER; note = 2'-deoxy-2'-fluoro-guanosine-3'-phosphate
  modified_base 9: mod_base = OTHER; note = 2'-deoxy-2'-fluoro-guanosine-3'-phosphate
  modified_base 10: mod_base = OTHER; note = 2'-O-methyl-uridine-3'-phosphate
  modified_base 11: mod_base = OTHER; note = 2'-O-methyl-uridine-3'-phosphate
  modified_base 12: mod_base = OTHER; note = 2'-O-methyl-adenosine-3'-phosphate
  modified_base 13: mod_base = OTHER; note = 2'-O-methyl-adenosine-3'-phosphate
  modified_base 14: mod_base = OTHER; note = 2'-O-methyl-uridine-3'-phosphate
  modified_base 15: mod_base = OTHER; note = 2'-O-methyl-adenosine-3'-phosphate
  modified_base 16: mod_base = OTHER; note = 2'-O-methyl-uridine-3'-phosphate
  modified_base 17: mod_base = OTHER; note = 2'-O-methyl-guanosine-3'-phosphate
  modified_base 18: mod_base = OTHER; note = 2'-O-methyl-uridine-3'-phosphate
  modified_base 19: mod_base = OTHER; note = 2'-O-methyl-guanosine-3'-phosphate
aactggtggttaatatgtg

SEQ ID NO: 1290 - RNA, 19 nt, synthetic construct
  source 1..19: mol_type = other RNA
  modified_base 1: mod_base = OTHER; note = 2'-O-methyl-adenosine-3'-phosphorothioate
  modified_base 2: mod_base = OTHER; note = 2'-O-methyl-cytidine-3'-phosphorothioate
  modified_base 3: mod_base = OTHER; note = 2'-O-methyl-uridine-3'-phosphate
  modified_base 4: mod_base = OTHER; note = 2'-O-methyl-guanosine-3'-phosphate
  modified_base 5: mod_base = OTHER; note = 2'-deoxy-2'-fluoro-guanosine-3'-phosphate
  modified_base 6: mod_base = OTHER; note = 2'-O-methyl-uridine-3'-phosphate
  modified_base 7: mod_base = OTHER; note = 2'-deoxy-2'-fluoro-guanosine-3'-phosphate
  modified_base 8: mod_base = OTHER; note = 2'-deoxy-2'-fluoro-guanosine-3'-phosphate
  modified_base 9: mod_base = OTHER; note = 2'-deoxy-2'-fluoro-uridine-3'-phosphate
  modified_base 10: mod_base = OTHER; note = 2'-O-methyl-uridine-3'-phosphate
  modified_base 11: mod_base = OTHER; note = 2'-O-methyl-adenosine-3'-phosphate
  modified_base 12: mod_base = OTHER; note = 2'-O-methyl-adenosine-3'-phosphate
  modified_base 13: mod_base = OTHER; note = 2'-O-methyl-uridine-3'-phosphate
  modified_base 14: mod_base = OTHER; note = 2'-O-methyl-adenosine-3'-phosphate
  modified_base 15: mod_base = OTHER; note = 2'-O-methyl-uridine-3'-phosphate
  modified_base 16: mod_base = OTHER; note = 2'-O-methyl-guanosine-3'-phosphate
  modified_base 17: mod_base = OTHER; note = 2'-O-methyl-uridine-3'-phosphate
  modified_base 18: mod_base = OTHER; note = 2'-O-methyl-guanosine-3'-phosphate
  modified_base 19: mod_base = OTHER; note = 2'-O-methyl-adenosine-3'-phosphate
actggtggttaatatgtga

SEQ ID NO: 1291 - RNA, 19 nt, synthetic construct
  source 1..19: mol_type = other RNA
  modified_base 1: mod_base = OTHER; note = 2'-O-methyl-adenosine-3'-phosphorothioate
  modified_base 2: mod_base = OTHER; note = 2'-O-methyl-uridine-3'-phosphorothioate
  modified_base 3: mod_base = OTHER; note = 2'-O-methyl-uridine-3'-phosphate
  modified_base 4: mod_base = OTHER; note = 2'-O-methyl-adenosine-3'-phosphate
  modified_base 5: mod_base = OTHER; note = 2'-deoxy-2'-fluoro-uridine-3'-phosphate
  modified_base 6: mod_base = OTHER; note = 2'-O-methyl-adenosine-3'-phosphate
  modified_base 7: mod_base = OTHER; note = 2'-deoxy-2'-fluoro-cytidine-3'-phosphate
  modified_base 8: mod_base = OTHER; note = 2'-deoxy-2'-fluoro-adenosine-3'-phosphate
  modified_base 9: mod_base = OTHER; note = 2'-deoxy-2'-fluoro-cytidine-3'-phosphate
  modified_base 10: mod_base = OTHER; note = 2'-O-methyl-uridine-3'-phosphate
  modified_base 11: mod_base = OTHER; note = 2'-O-methyl-adenosine-3'-phosphate
  modified_base 12: mod_base = OTHER; note = 2'-O-methyl-uridine-3'-phosphate
  modified_base 13: mod_base = OTHER; note = 2'-O-methyl-adenosine-3'-phosphate
  modified_base 14: mod_base = OTHER; note = 2'-O-methyl-uridine-3'-phosphate
  modified_base 15: mod_base = OTHER; note = 2'-O-methyl-uridine-3'-phosphate
  modified_base 16: mod_base = OTHER; note = 2'-O-methyl-cytidine-3'-phosphate
  modified_base 17: mod_base = OTHER; note = 2'-O-methyl-cytidine-3'-phosphate
  modified_base 18: mod_base = OTHER; note = 2'-O-methyl-uridine-3'-phosphate
  modified_base 19: mod_base = OTHER; note = 2'-O-methyl-adenosine-3'-phosphate
attatacactatattccta

SEQ ID NO: 1292 - RNA, 19 nt, synthetic construct
  source 1..19: mol_type = other RNA
  modified_base 1: mod_base = OTHER; note = 2'-O-methyl-guanosine-3'-phosphorothioate
  modified_base 2: mod_base = OTHER; note = 2'-O-methyl-uridine-3'-phosphorothioate
  modified_base 3: mod_base = OTHER; note = 2'-O-methyl-adenosine-3'-phosphate
  modified_base 4: mod_base = OTHER; note = 2'-O-methyl-adenosine-3'-phosphate
  modified_base 5: mod_base = OTHER; note = 2'-deoxy-2'-fluoro-adenosine-3'-phosphate
  modified_base 6: mod_base = OTHER; note = 2'-O-methyl-uridine-3'-phosphate
  modified_base 7: mod_base = OTHER; note = 2'-deoxy-2'-fluoro-uridine-3'-phosphate
  modified_base 8: mod_base = OTHER; note = 2'-deoxy-2'-fluoro-adenosine-3'-phosphate
  modified_base 9: mod_base = OTHER; note = 2'-deoxy-2'-fluoro-cytidine-3'-phosphate
  modified_base 10: mod_base = OTHER; note = 2'-O-methyl-cytidine-3'-phosphate
  modified_base 11: mod_base = OTHER; note = 2'-O-methyl-adenosine-3'-phosphate
  modified_base 12: mod_base = OTHER; note = 2'-O-methyl-adenosine-3'-phosphate
  modified_base 13: mod_base = OTHER; note = 2'-O-methyl-uridine-3'-phosphate
  modified_base 14: mod_base = OTHER; note = 2'-O-methyl-adenosine-3'-phosphate
  modified_base 15: mod_base = OTHER; note = 2'-O-methyl-cytidine-3'-phosphate
  modified_base 16: mod_base = OTHER; note = 2'-O-methyl-adenosine-3'-phosphate
  modified_base 17: mod_base = OTHER; note = 2'-O-methyl-guanosine-3'-phosphate
  modified_base 18: mod_base = OTHER; note = 2'-O-methyl-adenosine-3'-phosphate
  modified_base 19: mod_base = OTHER; note = 2'-O-methyl-adenosine-3'-phosphate
gtaaattaccaatacagaa

SEQ ID NO: 1293 - RNA, 19 nt, synthetic construct
  source 1..19: mol_type = other RNA
  modified_base 1: mod_base = OTHER; note = 2'-O-methyl-adenosine-3'-phosphorothioate
  modified_base 2: mod_base = OTHER; note = 2'-O-methyl-adenosine-3'-phosphorothioate
  modified_base 3: mod_base = OTHER; note = 2'-O-methyl-cytidine-3'-phosphate
  modified_base 4: mod_base = OTHER; note = 2'-O-methyl-uridine-3'-phosphate
  modified_base 5: mod_base = OTHER; note = 2'-deoxy-2'-fluoro-guanosine-3'-phosphate
  modified_base 6: mod_base = OTHER; note = 2'-O-methyl-adenosine-3'-phosphate
  modified_base 7: mod_base = OTHER; note = 2'-deoxy-2'-fluoro-uridine-3'-phosphate
  modified_base 8: mod_base = OTHER; note = 2'-deoxy-2'-fluoro-uridine-3'-phosphate
  modified_base 9: mod_base = OTHER; note = 2'-deoxy-2'-fluoro-adenosine-3'-phosphate
  modified_base 10: mod_base = OTHER; note = 2'-O-methyl-guanosine-3'-phosphate
  modified_base 11: mod_base = OTHER; note = 2'-O-methyl-uridine-3'-phosphate
  modified_base 12: mod_base = OTHER; note = 2'-O-methyl-cytidine-3'-phosphate
  modified_base 13: mod_base = OTHER; note = 2'-O-methyl-adenosine-3'-phosphate
  modified_base 14: mod_base = OTHER; note = 2'-O-methyl-uridine-3'-phosphate
  modified_base 15: mod_base = OTHER; note = 2'-O-methyl-adenosine-3'-phosphate
  modified_base 16: mod_base = OTHER; note = 2'-O-methyl-uridine-3'-phosphate
  modified_base 17: mod_base = OTHER; note = 2'-O-methyl-uridine-3'-phosphate
  modified_base 18: mod_base = OTHER; note = 2'-O-methyl-cytidine-3'-phosphate
  modified_base 19: mod_base = OTHER; note = 2'-O-methyl-cytidine-3'-phosphate
aactgattagtcatattcc

SEQ ID NO: 1294 - RNA, 19 nt, synthetic construct
  source 1..19: mol_type = other RNA
  modified_base 1: mod_base = OTHER; note = 2'-O-methyl-adenosine-3'-phosphorothioate
  modified_base 2: mod_base = OTHER; note = 2'-O-methyl-cytidine-3'-phosphorothioate
  modified_base 3: mod_base = OTHER; note = 2'-O-methyl-uridine-3'-phosphate
  modified_base 4: mod_base = OTHER; note = 2'-O-methyl-adenosine-3'-phosphate
  modified_base 5: mod_base = OTHER; note = 2'-deoxy-2'-fluoro-uridine-3'-phosphate
  modified_base 6: mod_base = OTHER; note = 2'-O-methyl-adenosine-3'-phosphate
  modified_base 7: mod_base = OTHER; note = 2'-deoxy-2'-fluoro-guanosine-3'-phosphate
  modified_base 8: mod_base = OTHER; note = 2'-deoxy-2'-fluoro-adenosine-3'-phosphate
  modified_base 9: mod_base = OTHER; note = 2'-deoxy-2'-fluoro-adenosine-3'-phosphate
  modified_base 10: mod_base = OTHER; note = 2'-O-methyl-uridine-3'-phosphate
  modified_base 11: mod_base = OTHER; note = 2'-O-methyl-adenosine-3'-phosphate
  modified_base 12: mod_base = OTHER; note = 2'-O-methyl-adenosine-3'-phosphate
  modified_base 13: mod_base = OTHER; note = 2'-O-methyl-guanosine-3'-phosphate
  modified_base 14: mod_base = OTHER; note = 2'-O-methyl-uridine-3'-phosphate
  modified_base 15: mod_base = OTHER; note = 2'-O-methyl-uridine-3'-phosphate
  modified_base 16: mod_base = OTHER; note = 2'-O-methyl-cytidine-3'-phosphate
  modified_base 17: mod_base = OTHER; note = 2'-O-methyl-uridine-3'-phosphate
  modified_base 18: mod_base = OTHER; note = 2'-O-methyl-uridine-3'-phosphate
  modified_base 19: mod_base = OTHER; note = 2'-O-methyl-adenosine-3'-phosphate
actatagaataagttctta

SEQ ID NO: 1295 - RNA, 19 nt, synthetic construct
  source 1..19: mol_type = other RNA
  modified_base 1: mod_base = OTHER; note = 2'-O-methyl-guanosine-3'-phosphorothioate
  modified_base 2: mod_base = OTHER; note = 2'-O-methyl-cytidine-3'-phosphorothioate
  modified_base 3: mod_base = OTHER; note = 2'-O-methyl-uridine-3'-phosphate
  modified_base 4: mod_base = OTHER; note = 2'-O-methyl-adenosine-3'-phosphate
  modified_base 5: mod_base = OTHER; note = 2'-deoxy-2'-fluoro-uridine-3'-phosphate
  modified_base 6: mod_base = OTHER; note = 2'-O-methyl-adenosine-3'-phosphate
  modified_base 7: mod_base = OTHER; note = 2'-deoxy-2'-fluoro-adenosine-3'-phosphate
  modified_base 8: mod_base = OTHER; note = 2'-deoxy-2'-fluoro-guanosine-3'-phosphate
  modified_base 9: mod_base = OTHER; note = 2'-deoxy-2'-fluoro-adenosine-3'-phosphate
  modified_base 10: mod_base = OTHER; note = 2'-O-methyl-adenosine-3'-phosphate
  modified_base 11: mod_base = OTHER; note = 2'-O-methyl-guanosine-3'-phosphate
  modified_base 12: mod_base = OTHER; note = 2'-O-methyl-adenosine-3'-phosphate
  modified_base 13: mod_base = OTHER; note = 2'-O-methyl-guanosine-3'-phosphate
  modified_base 14: mod_base = OTHER; note = 2'-O-methyl-cytidine-3'-phosphate
  modified_base 15: mod_base = OTHER; note = 2'-O-methyl-cytidine-3'-phosphate
  modified_base 16: mod_base = OTHER; note = 2'-O-methyl-uridine-3'-phosphate
  modified_base 17: mod_base = OTHER; note = 2'-O-methyl-cytidine-3'-phosphate
  modified_base 18: mod_base = OTHER; note = 2'-O-methyl-adenosine-3'-phosphate
  modified_base 19: mod_base = OTHER; note = 2'-O-methyl-adenosine-3'-phosphate
gctataagaagagcctcaa

SEQ ID NO: 1296 - RNA, 19 nt, synthetic construct
  source 1..19: mol_type = other RNA
  modified_base 1: mod_base = OTHER; note = 2'-O-methyl-adenosine-3'-phosphorothioate
  modified_base 2: mod_base = OTHER; note = 2'-O-methyl-adenosine-3'-phosphorothioate
  modified_base 3: mod_base = OTHER; note = 2'-O-methyl-adenosine-3'-phosphate
  modified_base 4: mod_base = OTHER; note = 2'-O-methyl-guanosine-3'-phosphate
  modified_base 5: mod_base = OTHER; note = 2'-deoxy-2'-fluoro-guanosine-3'-phosphate
  modified_base 6: mod_base = OTHER; note = 2'-O-methyl-uridine-3'-phosphate
  modified_base 7: mod_base = OTHER; note = 2'-deoxy-2'-fluoro-cytidine-3'-phosphate
  modified_base 8: mod_base = OTHER; note = 2'-deoxy-2'-fluoro-adenosine-3'-phosphate
  modified_base 9: mod_base = OTHER; note = 2'-deoxy-2'-fluoro-adenosine-3'-phosphate
  modified_base 10: mod_base = OTHER; note = 2'-O-methyl-guanosine-3'-phosphate
  modified_base 11: mod_base = OTHER; note = 2'-O-methyl-adenosine-3'-phosphate
  modified_base 12: mod_base = OTHER; note = 2'-O-methyl-uridine-3'-phosphate
  modified_base 13: mod_base = OTHER; note = 2'-O-methyl-uridine-3'-phosphate
  modified_base 14: mod_base = OTHER; note = 2'-O-methyl-adenosine-3'-phosphate
  modified_base 15: mod_base = OTHER; note = 2'-O-methyl-adenosine-3'-phosphate
  modified_base 16: mod_base = OTHER; note = 2'-O-methyl-guanosine-3'-phosphate
  modified_base 17: mod_base = OTHER; note = 2'-O-methyl-adenosine-3'-phosphate
  modified_base 18: mod_base = OTHER; note = 2'-O-methyl-cytidine-3'-phosphate
  modified_base 19: mod_base = OTHER; note = 2'-O-methyl-uridine-3'-phosphate
aaaggtcaagattaagact

SEQ ID NO: 1297 - RNA, 19 nt, synthetic construct
  source 1..19: mol_type = other RNA
  modified_base 1: mod_base = OTHER; note = 2'-O-methyl-adenosine-3'-phosphorothioate
  modified_base 2: mod_base = OTHER; note = 2'-O-methyl-adenosine-3'-phosphorothioate
  modified_base 3: mod_base = OTHER; note = 2'-O-methyl-guanosine-3'-phosphate
  modified_base 4: mod_base = OTHER; note = 2'-O-methyl-guanosine-3'-phosphate
  modified_base 5: mod_base = OTHER; note = 2'-deoxy-2'-fluoro-uridine-3'-phosphate
  modified_base 6: mod_base = OTHER; note = 2'-O-methyl-cytidine-3'-phosphate
  modified_base 7: mod_base = OTHER; note = 2'-deoxy-2'-fluoro-adenosine-3'-phosphate
  modified_base 8: mod_base = OTHER; note = 2'-deoxy-2'-fluoro-adenosine-3'-phosphate
  modified_base 9: mod_base = OTHER; note = 2'-deoxy-2'-fluoro-guanosine-3'-phosphate
  modified_base 10: mod_base = OTHER; note = 2'-O-methyl-adenosine-3'-phosphate
  modified_base 11: mod_base = OTHER; note = 2'-O-methyl-uridine-3'-phosphate
  modified_base 12: mod_base = OTHER; note = 2'-O-methyl-uridine-3'-phosphate
  modified_base 13: mod_base = OTHER; note = 2'-O-methyl-adenosine-3'-phosphate
  modified_base 14: mod_base = OTHER; note = 2'-O-methyl-adenosine-3'-phosphate
  modified_base 15: mod_base = OTHER; note = 2'-O-methyl-guanosine-3'-phosphate
  modified_base 16: mod_base = OTHER; note = 2'-O-methyl-adenosine-3'-phosphate
  modified_base 17: mod_base = OTHER; note = 2'-O-methyl-cytidine-3'-phosphate
  modified_base 18: mod_base = OTHER; note = 2'-O-methyl-uridine-3'-phosphate
  modified_base 19: mod_base = OTHER; note = 2'-O-methyl-adenosine-3'-phosphate
aaggtcaagattaagacta

SEQ ID NO: 1298 - RNA, 19 nt, synthetic construct
  source 1..19: mol_type = other RNA
  modified_base 1: mod_base = OTHER; note = 2'-O-methyl-adenosine-3'-phosphorothioate
  modified_base 2: mod_base = OTHER; note = 2'-O-methyl-guanosine-3'-phosphorothioate
  modified_base 3: mod_base = OTHER; note = 2'-O-methyl-adenosine-3'-phosphate
  modified_base 4: mod_base = OTHER; note = 2'-O-methyl-uridine-3'-phosphate
  modified_base 5: mod_base = OTHER; note = 2'-deoxy-2'-fluoro-uridine-3'-phosphate
  modified_base 6: mod_base = OTHER; note = 2'-O-methyl-adenosine-3'-phosphate
  modified_base 7: mod_base = OTHER; note = 2'-deoxy-2'-fluoro-adenosine-3'-phosphate
  modified_base 8: mod_base = OTHER; note = 2'-deoxy-2'-fluoro-guanosine-3'-phosphate
  modified_base 9: mod_base = OTHER; note = 2'-deoxy-2'-fluoro-adenosine-3'-phosphate
  modified_base 10: mod_base = OTHER; note = 2'-O-methyl-cytidine-3'-phosphate
  modified_base 11: mod_base = OTHER; note = 2'-O-methyl-uridine-3'-phosphate
  modified_base 12: mod_base = OTHER; note = 2'-O-methyl-adenosine-3'-phosphate
  modified_base 13: mod_base = OTHER; note = 2'-O-methyl-adenosine-3'-phosphate
  modified_base 14: mod_base = OTHER; note = 2'-O-methyl-adenosine-3'-phosphate
  modified_base 15: mod_base = OTHER; note = 2'-O-methyl-adenosine-3'-phosphate
  modified_base 16: mod_base = OTHER; note = 2'-O-methyl-cytidine-3'-phosphate
  modified_base 17: mod_base = OTHER; note = 2'-O-methyl-uridine-3'-phosphate
  modified_base 18: mod_base = OTHER; note = 2'-O-methyl-uridine-3'-phosphate
  modified_base 19: mod_base = OTHER; note = 2'-O-methyl-adenosine-3'-phosphate
agattaagactaaaactta

SEQ ID NO: 1299 - RNA, 19 nt, synthetic construct
  source 1..19: mol_type = other RNA
  modified_base 1: mod_base = OTHER; note = 2'-O-methyl-adenosine-3'-phosphorothioate
  modified_base 2: mod_base = OTHER; note = 2'-O-methyl-cytidine-3'-phosphorothioate
  modified_base 3: mod_base = OTHER; note = 2'-O-methyl-adenosine-3'-phosphate
  modified_base 4: mod_base = OTHER; note = 2'-O-methyl-adenosine-3'-phosphate
  modified_base 5: mod_base = OTHER; note = 2'-deoxy-2'-fluoro-adenosine-3'-phosphate
  modified_base 6: mod_base = OTHER; note = 2'-O-methyl-uridine-3'-phosphate
  modified_base 7: mod_base = OTHER; note = 2'-deoxy-2'-fluoro-guanosine-3'-phosphate
  modified_base 8: mod_base = OTHER; note = 2'-deoxy-2'-fluoro-adenosine-3'-phosphate
  modified_base 9: mod_base = OTHER; note = 2'-deoxy-2'-fluoro-adenosine-3'-phosphate
  modified_base 10: mod_base = OTHER; note = 2'-O-methyl-guanosine-3'-phosphate
  modified_base 11: mod_base = OTHER; note = 2'-O-methyl-uridine-3'-phosphate
  modified_base 12: mod_base = OTHER; note = 2'-O-methyl-guanosine-3'-phosphate
  modified_base 13: mod_base = OTHER; note = 2'-O-methyl-uridine-3'-phosphate
  modified_base 14: mod_base = OTHER; note = 2'-O-methyl-cytidine-3'-phosphate
  modified_base 15: mod_base = OTHER; note = 2'-O-methyl-adenosine-3'-phosphate
  modified_base 16: mod_base = OTHER; note = 2'-O-methyl-uridine-3'-phosphate
  modified_base 17: mod_base = OTHER; note = 2'-O-methyl-uridine-3'-phosphate
  modified_base 18: mod_base = OTHER; note = 2'-O-methyl-adenosine-3'-phosphate
  modified_base 19: mod_base = OTHER; note = 2'-O-methyl-uridine-3'-phosphate
acaaatgaagtgtcattat

SEQ ID NO: 1300 - RNA, 19 nt, synthetic construct
  source 1..19: mol_type = other RNA
  modified_base 1: mod_base = OTHER; note = 2'-O-methyl-cytidine-3'-phosphorothioate
  modified_base 2: mod_base = OTHER; note = 2'-O-methyl-uridine-3'-phosphorothioate
  modified_base 3: mod_base = OTHER; note = 2'-O-methyl-cytidine-3'-phosphate
  modified_base 4: mod_base = OTHER; note = 2'-O-methyl-adenosine-3'-phosphate
  modified_base 5: mod_base = OTHER; note = 2'-deoxy-2'-fluoro-cytidine-3'-phosphate
  modified_base 6: mod_base = OTHER; note = 2'-O-methyl-adenosine-3'-phosphate
  modified_base 7: mod_base = OTHER; note = 2'-deoxy-2'-fluoro-adenosine-3'-phosphate
  modified_base 8: mod_base = OTHER; note = 2'-deoxy-2'-fluoro-adenosine-3'-phosphate
  modified_base 9: mod_base = OTHER; note = 2'-deoxy-2'-fluoro-uridine-3'-phosphate
  modified_base 10: mod_base = OTHER; note = 2'-O-methyl-uridine-3'-phosphate
  modified_base 11: mod_base = OTHER; note = 2'-O-methyl-uridine-3'-phosphate
  modified_base 12: mod_base = OTHER; note = 2'-O-methyl-cytidine-3'-phosphate
  modified_base 13: mod_base = OTHER; note = 2'-O-methyl-uridine-3'-phosphate
  modified_base 14: mod_base = OTHER; note = 2'-O-methyl-adenosine-3'-phosphate
  modified_base 15: mod_base = OTHER; note = 2'-O-methyl-uridine-3'-phosphate
  modified_base 16: mod_base = OTHER; note = 2'-O-methyl-cytidine-3'-phosphate
  modified_base 17: mod_base = OTHER; note = 2'-O-methyl-cytidine-3'-phosphate
  modified_base 18: mod_base = OTHER; note = 2'-O-methyl-cytidine-3'-phosphate
  modified_base 19: mod_base = OTHER; note = 2'-O-methyl-adenosine-3'-phosphate
ctcacaaatttctatccca

SEQ ID NO: 1301 - RNA, 19 nt, synthetic construct
  source 1..19: mol_type = other RNA
  modified_base 1: mod_base = OTHER; note = 2'-O-methyl-uridine-3'-phosphorothioate
  modified_base 2: mod_base = OTHER; note = 2'-O-methyl-adenosine-3'-phosphorothioate
  modified_base 3: mod_base = OTHER; note = 2'-O-methyl-adenosine-3'-phosphate
  modified_base 4: mod_base = OTHER; note = 2'-O-methyl-adenosine-3'-phosphate
  modified_base 5: mod_base = OTHER; note = 2'-deoxy-2'-fluoro-adenosine-3'-phosphate
  modified_base 6: mod_base = OTHER; note = 2'-O-methyl-cytidine-3'-phosphate
  modified_base 7: mod_base = OTHER; note = 2'-deoxy-2'-fluoro-uridine-3'-phosphate
  modified_base 8: mod_base = OTHER; note = 2'-deoxy-2'-fluoro-guanosine-3'-phosphate
  modified_base 9: mod_base = OTHER; note = 2'-deoxy-2'-fluoro-cytidine-3'-phosphate
  modified_base 10: mod_base = OTHER; note = 2'-O-methyl-adenosine-3'-phosphate
  modified_base 11: mod_base = OTHER; note = 2'-O-methyl-cytidine-3'-phosphate
  modified_base 12: mod_base = OTHER; note = 2'-O-methyl-uridine-3'-phosphate
  modified_base 13: mod_base = OTHER; note = 2'-O-methyl-guanosine-3'-phosphate
  modified_base 14: mod_base = OTHER; note = 2'-O-methyl-cytidine-3'-phosphate
  modified_base 15: mod_base = OTHER; note = 2'-O-methyl-cytidine-3'-phosphate
  modified_base 16: mod_base = OTHER; note = 2'-O-methyl-adenosine-3'-phosphate
  modified_base 17: mod_base = OTHER; note = 2'-O-methyl-adenosine-3'-phosphate
  modified_base 18: mod_base = OTHER; note = 2'-O-methyl-cytidine-3'-phosphate
  modified_base 19: mod_base = OTHER; note = 2'-O-methyl-adenosine-3'-phosphate
taaaactgcactgccaaca

SEQ ID NO: 1302 - RNA, 19 nt, synthetic construct
  source 1..19: mol_type = other RNA
  modified_base 1: mod_base = OTHER; note = 2'-O-methyl-adenosine-3'-phosphorothioate
  modified_base 2: mod_base = OTHER; note = 2'-O-methyl-adenosine-3'-phosphorothioate
  modified_base 3: mod_base = OTHER; note = 2'-O-methyl-cytidine-3'-phosphate
  modified_base 4: mod_base = OTHER; note = 2'-O-methyl-uridine-3'-phosphate
  modified_base 5: mod_base = OTHER; note = 2'-deoxy-2'-fluoro-guanosine-3'-phosphate
  modified_base 6: mod_base = OTHER; note = 2'-O-methyl-cytidine-3'-phosphate
  modified_base 7: mod_base = OTHER; note = 2'-deoxy-2'-fluoro-adenosine-3'-phosphate
  modified_base 8: mod_base = OTHER; note = 2'-deoxy-2'-fluoro-cytidine-3'-phosphate
  modified_base 9: mod_base = OTHER; note = 2'-deoxy-2'-fluoro-uridine-3'-phosphate
  modified_base 10: mod_base = OTHER; note = 2'-O-methyl-guanosine-3'-phosphate
  modified_base 11: mod_base = OTHER; note = 2'-O-methyl-cytidine-3'-phosphate
  modified_base 12: mod_base = OTHER; note = 2'-O-methyl-cytidine-3'-phosphate
  modified_base 13: mod_base = OTHER; note = 2'-O-methyl-adenosine-3'-phosphate
  modified_base 14: mod_base = OTHER; note = 2'-O-methyl-adenosine-3'-phosphate
  modified_base 15: mod_base = OTHER; note = 2'-O-methyl-cytidine-3'-phosphate
  modified_base 16: mod_base = OTHER; note = 2'-O-methyl-adenosine-3'-phosphate
  modified_base 17: mod_base = OTHER; note = 2'-O-methyl-adenosine-3'-phosphate
  modified_base 18: mod_base = OTHER; note = 2'-O-methyl-guanosine-3'-phosphate
  modified_base 19: mod_base = OTHER; note = 2'-O-methyl-uridine-3'-phosphate
aactgcactgccaacaagt

SEQ ID NO: 1303 - RNA, 19 nt, synthetic construct
  source 1..19: mol_type = other RNA
  modified_base 1: mod_base = OTHER; note = 2'-O-methyl-adenosine-3'-phosphorothioate
  modified_base 2: mod_base = OTHER; note = 2'-O-methyl-guanosine-3'-phosphorothioate
  modified_base 3: mod_base = OTHER; note = 2'-O-methyl-cytidine-3'-phosphate
  modified_base 4: mod_base = OTHER; note = 2'-O-methyl-uridine-3'-phosphate
  modified_base 5: mod_base = OTHER; note = 2'-deoxy-2'-fluoro-adenosine-3'-phosphate
  modified_base 6: mod_base = OTHER; note = 2'-O-methyl-cytidine-3'-phosphate
  modified_base 7: mod_base = OTHER; note = 2'-deoxy-2'-fluoro-adenosine-3'-phosphate
  modified_base 8: mod_base = OTHER; note = 2'-deoxy-2'-fluoro-guanosine-3'-phosphate
  modified_base 9: mod_base = OTHER; note = 2'-deoxy-2'-fluoro-adenosine-3'-phosphate
  modified_base 10: mod_base = OTHER; note = 2'-O-methyl-adenosine-3'-phosphate
  modified_base 11: mod_base = OTHER; note = 2'-O-methyl-uridine-3'-phosphate
  modified_base 12: mod_base = OTHER; note = 2'-O-methyl-cytidine-3'-phosphate
  modified_base 13: mod_base = OTHER; note = 2'-O-methyl-uridine-3'-phosphate
  modified_base 14: mod_base = OTHER; note = 2'-O-methyl-adenosine-3'-phosphate
  modified_base 15: mod_base = OTHER; note = 2'-O-methyl-uridine-3'-phosphate
  modified_base 16: mod_base = OTHER; note = 2'-O-methyl-uridine-3'-phosphate
  modified_base 17: mod_base = OTHER; note = 2'-O-methyl-uridine-3'-phosphate
  modified_base 18: mod_base = OTHER; note = 2'-O-methyl-adenosine-3'-phosphate
  modified_base 19: mod_base = OTHER; note = 2'-O-methyl-uridine-3'-phosphate
agctacagaatctatttat

SEQ ID NO: 1304 - RNA, 19 nt, synthetic construct
  source 1..19: mol_type = other RNA
  modified_base 1: mod_base = OTHER; note = 2'-O-methyl-guanosine-3'-phosphorothioate
  modified_base 2: mod_base = OTHER; note = 2'-O-methyl-cytidine-3'-phosphorothioate
  modified_base 3: mod_base = OTHER; note = 2'-O-methyl-uridine-3'-phosphate
  modified_base 4: mod_base = OTHER; note = 2'-O-methyl-adenosine-3'-phosphate
  modified_base 5: mod_base = OTHER; note = 2'-deoxy-2'-fluoro-cytidine-3'-phosphate
  modified_base 6: mod_base = OTHER; note = 2'-O-methyl-adenosine-3'-phosphate
  modified_base 7: mod_base = OTHER; note = 2'-deoxy-2'-fluoro-guanosine-3'-phosphate
  modified_base 8: mod_base = OTHER; note = 2'-deoxy-2'-fluoro-adenosine-3'-phosphate
  modified_base 9: mod_base = OTHER; note = 2'-deoxy-2'-fluoro-adenosine-3'-phosphate
  modified_base 10: mod_base = OTHER; note = 2'-O-methyl-uridine-3'-phosphate
  modified_base 11: mod_base = OTHER; note = 2'-O-methyl-cytidine-3'-phosphate
  modified_base 12: mod_base = OTHER; note = 2'-O-methyl-uridine-3'-phosphate
  modified_base 13: mod_base = OTHER; note = 2'-O-methyl-adenosine-3'-phosphate
  modified_base 14: mod_base = OTHER; note = 2'-O-methyl-uridine-3'-phosphate
  modified_base 15: mod_base = OTHER; note = 2'-O-methyl-uridine-3'-phosphate
  modified_base 16: mod_base = OTHER; note = 2'-O-methyl-uridine-3'-phosphate
  modified_base 17: mod_base = OTHER; note = 2'-O-methyl-adenosine-3'-phosphate
  modified_base 18: mod_base = OTHER; note = 2'-O-methyl-uridine-3'-phosphate
  modified_base 19: mod_base = OTHER; note = 2'-O-methyl-cytidine-3'-phosphate
gctacagaatctatttatc

SEQ ID NO: 1305 - RNA, 19 nt, synthetic construct
  source 1..19: mol_type = other RNA
  modified_base 1: mod_base = OTHER; note = 2'-O-methyl-adenosine-3'-phosphorothioate
  modified_base 2: mod_base = OTHER; note = 2'-O-methyl-adenosine-3'-phosphorothioate
  modified_base 3: mod_base = OTHER; note = 2'-O-methyl-adenosine-3'-phosphate
  modified_base 4: mod_base = OTHER; note = 2'-O-methyl-adenosine-3'-phosphate
  modified_base 5: mod_base = OTHER; note = 2'-deoxy-2'-fluoro-cytidine-3'-phosphate
  modified_base 6: mod_base = OTHER; note = 2'-O-methyl-uridine-3'-phosphate
  modified_base 7: mod_base = OTHER; note = 2'-deoxy-2'-fluoro-uridine-3'-phosphate
  modified_base 8: mod_base = OTHER; note = 2'-deoxy-2'-fluoro-adenosine-3'-phosphate
  modified_base 9: mod_base = OTHER; note = 2'-deoxy-2'-fluoro-uridine-3'-phosphate
  modified_base 10: mod_base = OTHER; note = 2'-O-methyl-uridine-3'-phosphate
  modified_base 11: mod_base = OTHER; note = 2'-O-methyl-guanosine-3'-phosphate
  modified_base 12: mod_base = OTHER; note = 2'-O-methyl-uridine-3'-phosphate
  modified_base 13: mod_base = OTHER; note = 2'-O-methyl-uridine-3'-phosphate
  modified_base 14: mod_base = OTHER; note = 2'-O-methyl-adenosine-3'-phosphate
  modified_base 15: mod_base = OTHER; note = 2'-O-methyl-cytidine-3'-phosphate
  modified_base 16: mod_base = OTHER; note = 2'-O-methyl-cytidine-3'-phosphate
  modified_base 17: mod_base = OTHER; note = 2'-O-methyl-adenosine-3'-phosphate
  modified_base 18: mod_base = OTHER; note = 2'-O-methyl-uridine-3'-phosphate
  modified_base 19: mod_base = OTHER; note = 2'-O-methyl-adenosine-3'-phosphate
aaaacttattgttaccata

SEQ ID NO: 1306 - RNA, 19 nt, synthetic construct
  source 1..19: mol_type = other RNA
  modified_base 1: mod_base = OTHER; note = 2'-O-methyl-guanosine-3'-phosphorothioate
  modified_base 2: mod_base = OTHER; note = 2'-O-methyl-adenosine-3'-phosphorothioate
  modified_base 3: mod_base = OTHER; note = 2'-O-methyl-adenosine-3'-phosphate
  modified_base 4: mod_base = OTHER; note = 2'-O-methyl-cytidine-3'-phosphate
  modified_base 5: mod_base = OTHER; note = 2'-deoxy-2'-fluoro-uridine-3'-phosphate
  modified_base 6: mod_base = OTHER; note = 2'-O-methyl-guanosine-3'-phosphate
  modified_base 7: mod_base = OTHER; note = 2'-deoxy-2'-fluoro-guanosine-3'-phosphate
  modified_base 8: mod_base = OTHER; note = 2'-deoxy-2'-fluoro-uridine-3'-phosphate
  modified_base 9: mod_base = OTHER; note = 2'-deoxy-2'-fluoro-guanosine-3'-phosphate
  modified_base 10: mod_base = OTHER; note = 2'-O-methyl-guanosine-3'-phosphate
  modified_base 11: mod_base = OTHER; note = 2'-O-methyl-uridine-3'-phosphate
  modified_base 12: mod_base = OTHER; note = 2'-O-methyl-uridine-3'-phosphate
  modified_base 13: mod_base = OTHER; note = 2'-O-methyl-adenosine-3'-phosphate
  modified_base 14: mod_base = OTHER; note = 2'-O-methyl-adenosine-3'-phosphate
  modified_base 15: mod_base = OTHER; note = 2'-O-methyl-uridine-3'-phosphate
  modified_base 16: mod_base = OTHER; note = 2'-O-methyl-adenosine-3'-phosphate
  modified_base 17: mod_base = OTHER; note = 2'-O-methyl-uridine-3'-phosphate
  modified_base 18: mod_base = OTHER; note = 2'-O-methyl-guanosine-3'-phosphate
  modified_base 19: mod_base = OTHER; note = 2'-O-methyl-uridine-3'-phosphate
gaactggtggttaatatgt

SEQ ID NO: 1307 - RNA, 19 nt, synthetic construct
  source 1..19: mol_type = other RNA
  modified_base 1: mod_base = OTHER; note = 2'-O-methyl-adenosine-3'-phosphorothioate
  modified_base 2: mod_base = OTHER; note = 2'-O-methyl-adenosine-3'-phosphorothioate
  modified_base 3: mod_base = OTHER; note = 2'-O-methyl-cytidine-3'-phosphate
  modified_base 4: mod_base = OTHER; note = 2'-O-methyl-uridine-3'-phosphate
  modified_base 5: mod_base = OTHER; note = 2'-deoxy-2'-fluoro-guanosine-3'-phosphate
  modified_base 6: mod_base = OTHER; note = 2'-O-methyl-guanosine-3'-phosphate
  modified_base 7: mod_base = OTHER; note = 2'-deoxy-2'-fluoro-uridine-3'-phosphate
  modified_base 8: mod_base = OTHER; note = 2'-deoxy-2'-fluoro-guanosine-3'-phosphate
  modified_base 9: mod_base = OTHER; note = 2'-deoxy-2'-fluoro-guanosine-3'-phosphate
  modified_base 10: mod_base = OTHER; note = 2'-O-methyl-uridine-3'-phosphate
  modified_base 11: mod_base = OTHER; note = 2'-O-methyl-uridine-3'-phosphate
  modified_base 12: mod_base = OTHER; note = 2'-O-methyl-adenosine-3'-phosphate
  modified_base 13: mod_base = OTHER; note = 2'-O-methyl-adenosine-3'-phosphate
  modified_base 14: mod_base = OTHER; note = 2'-O-methyl-uridine-3'-phosphate
  modified_base 15: mod_base = OTHER; note = 2'-O-methyl-adenosine-3'-phosphate
  modified_base 16: mod_base = OTHER; note = 2'-O-methyl-uridine-3'-phosphate
  modified_base 17: mod_base = OTHER; note = 2'-O-methyl-guanosine-3'-phosphate
  modified_base 18: mod_base = OTHER; note = 2'-O-methyl-uridine-3'-phosphate
  modified_base 19: mod_base = OTHER; note = 2'-O-methyl-guanosine-3'-phosphate
aactggtggttaatatgtg

SEQ ID NO: 1308 - RNA, 19 nt, synthetic construct
  source 1..19: mol_type = other RNA
  modified_base 1: mod_base = OTHER; note = 2'-O-methyl-adenosine-3'-phosphorothioate
  modified_base 2: mod_base = OTHER; note = 2'-O-methyl-cytidine-3'-phosphorothioate
  modified_base 3: mod_base = OTHER; note = 2'-O-methyl-uridine-3'-phosphate
  modified_base 4: mod_base = OTHER; note = 2'-O-methyl-guanosine-3'-phosphate
  modified_base 5: mod_base = OTHER; note = 2'-deoxy-2'-fluoro-guanosine-3'-phosphate
  modified_base 6: mod_base = OTHER; note = 2'-O-methyl-uridine-3'-phosphate
  modified_base 7: mod_base = OTHER; note = 2'-deoxy-2'-fluoro-guanosine-3'-phosphate
  modified_base 8: mod_base = OTHER; note = 2'-deoxy-2'-fluoro-guanosine-3'-phosphate
  modified_base 9: mod_base = OTHER; note = 2'-deoxy-2'-fluoro-uridine-3'-phosphate
  modified_base 10: mod_base = OTHER; note = 2'-O-methyl-uridine-3'-phosphate
  modified_base 11: mod_base = OTHER; note = 2'-O-methyl-adenosine-3'-phosphate
  modified_base 12: mod_base = OTHER; note = 2'-O-methyl-adenosine-3'-phosphate
  modified_base 13: mod_base = OTHER; note = 2'-O-methyl-uridine-3'-phosphate
  modified_base 14: mod_base = OTHER; note = 2'-O-methyl-adenosine-3'-phosphate
  modified_base 15: mod_base = OTHER; note = 2'-O-methyl-uridine-3'-phosphate
  modified_base 16: mod_base = OTHER; note = 2'-O-methyl-guanosine-3'-phosphate
  modified_base 17: mod_base = OTHER; note = 2'-O-methyl-uridine-3'-phosphate
  modified_base 18: mod_base = OTHER; note = 2'-O-methyl-guanosine-3'-phosphate
  modified_base 19: mod_base = OTHER; note = 2'-O-methyl-adenosine-3'-phosphate
actggtggttaatatgtga

SEQ ID NO: 1309 - RNA, 19 nt, synthetic construct
  source 1..19: mol_type = other RNA
  modified_base 1: mod_base = OTHER; note = 2'-O-methyl-cytidine-3'-phosphorothioate
  modified_base 2: mod_base = OTHER; note = 2'-O-methyl-uridine-3'-phosphorothioate
  modified_base 3: mod_base = OTHER; note = 2'-O-methyl-guanosine-3'-phosphate
  modified_base 4: mod_base = OTHER; note = 2'-O-methyl-guanosine-3'-phosphate
  modified_base 5: mod_base = OTHER; note = 2'-deoxy-2'-fluoro-uridine-3'-phosphate
  modified_base 6: mod_base = OTHER; note = 2'-O-methyl-guanosine-3'-phosphate
  modified_base 7: mod_base = OTHER; note = 2'-deoxy-2'-fluoro-guanosine-3'-phosphate
  modified_base 8: mod_base = OTHER; note = 2'-deoxy-2'-fluoro-uridine-3'-phosphate
  modified_base 9: mod_base = OTHER; note = 2'-deoxy-2'-fluoro-uridine-3'-phosphate
  modified_base 10: mod_base = OTHER; note = 2'-O-methyl-adenosine-3'-phosphate
  modified_base 11: mod_base = OTHER; note = 2'-O-methyl-adenosine-3'-phosphate
  modified_base 12: mod_base = OTHER; note = 2'-O-methyl-uridine-3'-phosphate
  modified_base 13: mod_base = OTHER; note = 2'-O-methyl-adenosine-3'-phosphate
  modified_base 14: mod_base = OTHER; note = 2'-O-methyl-uridine-3'-phosphate
  modified_base 15: mod_base = OTHER; note = 2'-O-methyl-guanosine-3'-phosphate
  modified_base 16: mod_base = OTHER; note = 2'-O-methyl-uridine-3'-phosphate
  modified_base 17: mod_base = OTHER; note = 2'-O-methyl-guanosine-3'-phosphate
  modified_base 18: mod_base = OTHER; note = 2'-O-methyl-adenosine-3'-phosphate
  modified_base 19: mod_base = OTHER; note = 2'-O-methyl-cytidine-3'-phosphate
ctggtggttaatatgtgac

SEQ ID NO: 1310 - RNA, 19 nt, synthetic construct
  source 1..19: mol_type = other RNA
  modified_base 1: mod_base = OTHER; note = 2'-O-methyl-adenosine-3'-phosphorothioate
  modified_base 2: mod_base = OTHER; note = 2'-O-methyl-uridine-3'-phosphorothioate
  modified_base 3: mod_base = OTHER; note = 2'-O-methyl-uridine-3'-phosphate
  modified_base 4: mod_base = OTHER; note = 2'-O-methyl-cytidine-3'-phosphate
  modified_base 5: mod_base = OTHER; note = 2'-deoxy-2'-fluoro-guanosine-3'-phosphate
  modified_base 6: mod_base = OTHER; note = 2'-O-methyl-uridine-3'-phosphate
  modified_base 7: mod_base = OTHER; note = 2'-deoxy-2'-fluoro-guanosine-3'-phosphate
  modified_base 8: mod_base = OTHER; note = 2'-deoxy-2'-fluoro-guanosine-3'-phosphate
  modified_base 9: mod_base = OTHER; note = 2'-deoxy-2'-fluoro-guanosine-3'-phosphate
  modified_base 10: mod_base = OTHER; note = 2'-O-methyl-uridine-3'-phosphate
  modified_base 11: mod_base = OTHER; note = 2'-O-methyl-cytidine-3'-phosphate
  modified_base 12: mod_base = OTHER; note = 2'-O-methyl-cytidine-3'-phosphate
  modified_base 13: mod_base = OTHER; note = 2'-O-methyl-guanosine-3'-phosphate
  modified_base 14: mod_base = OTHER; note = 2'-O-methyl-cytidine-3'-phosphate
  modified_base 15: mod_base = OTHER; note = 2'-O-methyl-adenosine-3'-phosphate
  modified_base 16: mod_base = OTHER; note = 2'-O-methyl-adenosine-3'-phosphate
  modified_base 17: mod_base = OTHER; note = 2'-O-methyl-adenosine-3'-phosphate
  modified_base 18: mod_base = OTHER; note = 2'-O-methyl-adenosine-3'-phosphate
  modified_base 19: mod_base = OTHER; note = 2'-O-methyl-uridine-3'-phosphate
attcgtgggtccgcaaaat

SEQ ID NO: 1311 - RNA, 19 nt, synthetic construct
  source 1..19: mol_type = other RNA
  modified_base 1: mod_base = OTHER; note = 2'-O-methyl-adenosine-3'-phosphorothioate
  modified_base 2: mod_base = OTHER; note = 2'-O-methyl-uridine-3'-phosphorothioate
  modified_base 3: mod_base = OTHER; note = 2'-O-methyl-adenosine-3'-phosphate
  modified_base 4: mod_base = OTHER; note = 2'-O-methyl-uridine-3'-phosphate
  modified_base 5: mod_base = OTHER; note = 2'-deoxy-2'-fluoro-uridine-3'-phosphate
  modified_base 6: mod_base = OTHER; note = 2'-O-methyl-cytidine-3'-phosphate
  modified_base 7: mod_base = OTHER; note = 2'-deoxy-2'-fluoro-cytidine-3'-phosphate
  modified_base 8: mod_base = OTHER; note = 2'-deoxy-2'-fluoro-uridine-3'-phosphate
  modified_base 9: mod_base = OTHER; note = 2'-deoxy-2'-fluoro-adenosine-3'-phosphate
  modified_base 10: mod_base = OTHER; note = 2'-O-methyl-cytidine-3'-phosphate
  modified_base 11: mod_base = OTHER; note = 2'-O-methyl-adenosine-3'-phosphate
  modified_base 12: mod_base = OTHER; note = 2'-O-methyl-adenosine-3'-phosphate
  modified_base 13: mod_base = OTHER; note = 2'-O-methyl-uridine-3'-phosphate
  modified_base 14: mod_base = OTHER; note = 2'-O-methyl-adenosine-3'-phosphate
  modified_base 15: mod_base = OTHER; note = 2'-O-methyl-adenosine-3'-phosphate
  modified_base 16: mod_base = OTHER; note = 2'-O-methyl-adenosine-3'-phosphate
  modified_base 17: mod_base = OTHER; note = 2'-O-methyl-guanosine-3'-phosphate
  modified_base 18: mod_base = OTHER; note = 2'-O-methyl-uridine-3'-phosphate
  modified_base 19: mod_base = OTHER; note = 2'-O-methyl-adenosine-3'-phosphate
atattcctacaataaagta

SEQ ID NO: 1312 - RNA, 19 nt, synthetic construct
  source 1..19: mol_type = other RNA
  modified_base 1: mod_base = OTHER; note = 2'-O-methyl-adenosine-3'-phosphorothioate
  modified_base 2: mod_base = OTHER; note = 2'-O-methyl-adenosine-3'-phosphorothioate
  modified_base 3: mod_base = OTHER; note = 2'-O-methyl-uridine-3'-phosphate
  modified_base 4: mod_base = OTHER; note = 2'-O-methyl-adenosine-3'-phosphate
  modified_base 5: mod_base = OTHER; note = 2'-deoxy-2'-fluoro-guanosine-3'-phosphate
  modified_base 6: mod_base = OTHER; note = 2'-O-methyl-guanosine-3'-phosphate
  modified_base 7: mod_base = OTHER; note = 2'-deoxy-2'-fluoro-adenosine-3'-phosphate
  modified_base 8: mod_base = OTHER; note = 2'-deoxy-2'-fluoro-uridine-3'-phosphate
  modified_base 9: mod_base = OTHER; note = 2'-deoxy-2'-fluoro-adenosine-3'-phosphate
  modified_base 10: mod_base = OTHER; note = 2'-O-methyl-uridine-3'-phosphate
  modified_base 11: mod_base = OTHER; note = 2'-O-methyl-adenosine-3'-phosphate
  modified_base 12: mod_base = OTHER; note = 2'-O-methyl-guanosine-3'-phosphate
  modified_base 13: mod_base = OTHER; note = 2'-O-methyl-cytidine-3'-phosphate
  modified_base 14: mod_base = OTHER; note = 2'-O-methyl-uridine-3'-phosphate
  modified_base 15: mod_base = OTHER; note = 2'-O-methyl-adenosine-3'-phosphate
  modified_base 16: mod_base = OTHER; note = 2'-O-methyl-uridine-3'-phosphate
  modified_base 17: mod_base = OTHER; note = 2'-O-methyl-uridine-3'-phosphate
  modified_base 18: mod_base = OTHER; note = 2'-O-methyl-uridine-3'-phosphate
  modified_base 19: mod_base = OTHER; note = 2'-O-methyl-uridine-3'-phosphate
aataggatatagctatttt

SEQ ID NO: 1313 - RNA, 19 nt, synthetic construct
  source 1..19: mol_type = other RNA
  modified_base 1: mod_base = OTHER; note = 2'-O-methyl-adenosine-3'-phosphorothioate
  modified_base 2: mod_base = OTHER; note = 2'-O-methyl-guanosine-3'-phosphorothioate
  modified_base 3: mod_base = OTHER; note = 2'-O-methyl-uridine-3'-phosphate
  modified_base 4: mod_base = OTHER; note = 2'-O-methyl-cytidine-3'-phosphate
  modified_base 5: mod_base = OTHER; note = 2'-deoxy-2'-fluoro-cytidine-3'-phosphate
  modified_base 6: mod_base = OTHER; note = 2'-O-methyl-adenosine-3'-phosphate
  modified_base 7: mod_base = OTHER; note = 2'-deoxy-2'-fluoro-cytidine-3'-phosphate
  modified_base 8: mod_base = OTHER; note = 2'-deoxy-2'-fluoro-uridine-3'-phosphate
  modified_base 9: mod_base = OTHER; note = 2'-deoxy-2'-fluoro-cytidine-3'-phosphate
  modified_base 10: mod_base = OTHER; note = 2'-O-methyl-uridine-3'-phosphate
  modified_base 11: mod_base = OTHER; note = 2'-O-methyl-adenosine-3'-phosphate
  modified_base 12: mod_base = OTHER; note = 2'-O-methyl-cytidine-3'-phosphate
  modified_base 13: mod_base = OTHER; note = 2'-O-methyl-uridine-3'-phosphate
  modified_base 14: mod_base = OTHER; note = 2'-O-methyl-guanosine-3'-phosphate
  modified_base 15: mod_base = OTHER; note = 2'-O-methyl-adenosine-3'-phosphate
  modified_base 16: mod_base = OTHER; note = 2'-O-methyl-guanosine-3'-phosphate
  modified_base 17: mod_base = OTHER; note = 2'-O-methyl-cytidine-3'-phosphate
  modified_base 18: mod_base = OTHER; note = 2'-O-methyl-uridine-3'-phosphate
  modified_base 19: mod_base = OTHER; note = 2'-O-methyl-adenosine-3'-phosphate
agtccactctactgagcta

SEQ ID NO: 1314 - RNA, 19 nt, synthetic construct
  source 1..19: mol_type = other RNA
  modified_base 1: mod_base = OTHER; note = 2'-O-methyl-adenosine-3'-phosphorothioate
  modified_base 2: mod_base = OTHER; note = 2'-O-methyl-uridine-3'-phosphorothioate
  modified_base 3: mod_base = OTHER; note = 2'-O-methyl-adenosine-3'-phosphate
  modified_base 4: mod_base = OTHER; note = 2'-O-methyl-adenosine-3'-phosphate
  modified_base 5: mod_base = OTHER; note = 2'-deoxy-2'-fluoro-uridine-3'-phosphate
  modified_base 6: mod_base = OTHER; note = 2'-O-methyl-cytidine-3'-phosphate
  modified_base 7: mod_base = OTHER; note = 2'-deoxy-2'-fluoro-cytidine-3'-phosphate
  modified_base 8: mod_base = OTHER; note = 2'-deoxy-2'-fluoro-adenosine-3'-phosphate
  modified_base 9: mod_base = OTHER; note = 2'-deoxy-2'-fluoro-adenosine-3'-phosphate
  modified_base 10: mod_base = OTHER; note = 2'-O-methyl-cytidine-3'-phosphate
  modified_base 11: mod_base = OTHER; note = 2'-O-methyl-adenosine-3'-phosphate
  modified_base 12: mod_base = OTHER; note = 2'-O-methyl-adenosine-3'-phosphate
  modified_base 13: mod_base = OTHER; note = 2'-O-methyl-uridine-3'-phosphate
  modified_base 14: mod_base = OTHER; note = 2'-O-methyl-uridine-3'-phosphate
  modified_base 15: mod_base = OTHER; note = 2'-O-methyl-uridine-3'-phosphate
  modified_base 16: mod_base = OTHER; note = 2'-O-methyl-uridine-3'-phosphate
  modified_base 17: mod_base = OTHER; note = 2'-O-methyl-adenosine-3'-phosphate
  modified_base 18: mod_base = OTHER; note = 2'-O-methyl-adenosine-3'-phosphate
  modified_base 19: mod_base = OTHER; note = 2'-O-methyl-uridine-3'-phosphate
ataatccaacaattttaat

SEQ ID NO: 1315 - RNA, 19 nt, synthetic construct
  source 1..19: mol_type = other RNA
  modified_base 1: mod_base = OTHER; note = 2'-O-methyl-adenosine-3'-phosphorothioate
  modified_base 2: mod_base = OTHER; note = 2'-O-methyl-uridine-3'-phosphorothioate
  modified_base 3: mod_base = OTHER; note = 2'-O-methyl-adenosine-3'-phosphate
  modified_base 4: mod_base = OTHER; note = 2'-O-methyl-uridine-3'-phosphate
  modified_base 5: mod_base = OTHER; note = 2'-deoxy-2'-fluoro-guanosine-3'-phosphate
  modified_base 6: mod_base = OTHER; note = 2'-O-methyl-uridine-3'-phosphate
  modified_base 7: mod_base = OTHER; note = 2'-deoxy-2'-fluoro-adenosine-3'-phosphate
  modified_base 8: mod_base = OTHER; note = 2'-deoxy-2'-fluoro-adenosine-3'-phosphate
  modified_base 9: mod_base = OTHER; note = 2'-deoxy-2'-fluoro-cytidine-3'-phosphate
  modified_base 10: mod_base = OTHER; note = 2'-O-methyl-adenosine-3'-phosphate
  modified_base 11: mod_base = OTHER; note = 2'-O-methyl-uridine-3'-phosphate
  modified_base 12: mod_base = OTHER; note = 2'-O-methyl-cytidine-3'-phosphate
  modified_base 13: mod_base = OTHER; note = 2'-O-methyl-adenosine-3'-phosphate
  modified_base 14: mod_base = OTHER; note = 2'-O-methyl-adenosine-3'-phosphate
  modified_base 15: mod_base = OTHER; note = 2'-O-methyl-uridine-3'-phosphate
  modified_base 16: mod_base = OTHER; note = 2'-O-methyl-adenosine-3'-phosphate
  modified_base 17: mod_base = OTHER; note = 2'-O-methyl-uridine-3'-phosphate
  modified_base 18: mod_base = OTHER; note = 2'-O-methyl-uridine-3'-phosphate
  modified_base 19: mod_base = OTHER; note = 2'-O-methyl-guanosine-3'-phosphate
atatgtaacatcaatattg

SEQ ID NO: 1316 - RNA, 19 nt, synthetic construct
  source 1..19: mol_type = other RNA
  modified_base 1: mod_base = OTHER; note = 2'-O-methyl-uridine-3'-phosphorothioate
  modified_base 2: mod_base = OTHER; note = 2'-O-methyl-guanosine-3'-phosphorothioate
  modified_base 3: mod_base = OTHER; note = 2'-O-methyl-adenosine-3'-phosphate
  modified_base 4: mod_base = OTHER; note = 2'-O-methyl-adenosine-3'-phosphate
  modified_base 5: mod_base = OTHER; note = 2'-deoxy-2'-fluoro-cytidine-3'-phosphate
  modified_base 6: mod_base = OTHER; note = 2'-O-methyl-cytidine-3'-phosphate
  modified_base 7: mod_base = OTHER; note = 2'-deoxy-2'-fluoro-cytidine-3'-phosphate
  modified_base 8: mod_base = OTHER; note = 2'-deoxy-2'-fluoro-adenosine-3'-phosphate
  modified_base 9: mod_base = OTHER; note = 2'-deoxy-2'-fluoro-uridine-3'-phosphate
  modified_base 10: mod_base = OTHER; note = 2'-O-methyl-guanosine-3'-phosphate
  modified_base 11: mod_base = OTHER; note = 2'-O-methyl-adenosine-3'-phosphate
  modified_base 12: mod_base = OTHER; note = 2'-O-methyl-guanosine-3'-phosphate
  modified_base 13: mod_base = OTHER; note = 2'-O-methyl-adenosine-3'-phosphate
  modified_base 14: mod_base = OTHER; note = 2'-O-methyl-guanosine-3'-phosphate
  modified_base 15: mod_base = OTHER; note = 2'-O-methyl-adenosine-3'-phosphate
  modified_base 16: mod_base = OTHER; note = 2'-O-methyl-uridine-3'-phosphate
  modified_base 17: mod_base = OTHER; note = 2'-O-methyl-adenosine-3'-phosphate
  modified_base 18: mod_base = OTHER; note = 2'-O-methyl-cytidine-3'-phosphate
  modified_base 19: mod_base = OTHER; note = 2'-O-methyl-uridine-3'-phosphate
tgaacccatgagagatact

SEQ ID NO: 1317 - RNA, 19 nt, synthetic construct
  source 1..19: mol_type = other RNA
  modified_base 1: mod_base = OTHER; note = 2'-O-methyl-uridine-3'-phosphorothioate
  modified_base 2: mod_base = OTHER; note = 2'-O-methyl-cytidine-3'-phosphorothioate
  modified_base 3: mod_base = OTHER; note = 2'-O-methyl-uridine-3'-phosphate
  modified_base 4: mod_base = OTHER; note = 2'-O-methyl-uridine-3'-phosphate
  modified_base 5: mod_base = OTHER; note = 2'-deoxy-2'-fluoro-adenosine-3'-phosphate
  modified_base 6: mod_base = OTHER; note = 2'-O-methyl-adenosine-3'-phosphate
  modified_base 7: mod_base = OTHER; note = 2'-deoxy-2'-fluoro-uridine-3'-phosphate
  modified_base 8: mod_base = OTHER; note = 2'-deoxy-2'-fluoro-uridine-3'-phosphate
  modified_base 9: mod_base = OTHER; note = 2'-deoxy-2'-fluoro-uridine-3'-phosphate
  modified_base 10: mod_base = OTHER; note = 2'-O-methyl-adenosine-3'-phosphate
  modified_base 11: mod_base = OTHER; note = 2'-O-methyl-cytidine-3'-phosphate
  modified_base 12: mod_base = OTHER; note = 2'-O-methyl-adenosine-3'-phosphate
  modified_base 13: mod_base = OTHER; note = 2'-O-methyl-guanosine-3'-phosphate
  modified_base 14: mod_base = OTHER; note = 2'-O-methyl-guanosine-3'-phosphate
  modified_base 15: mod_base = OTHER; note = 2'-O-methyl-guanosine-3'-phosphate
  modified_base 16: mod_base = OTHER; note = 2'-O-methyl-cytidine-3'-phosphate
  modified_base 17: mod_base = OTHER; note = 2'-O-methyl-adenosine-3'-phosphate
  modified_base 18: mod_base = OTHER; note = 2'-O-methyl-cytidine-3'-phosphate
  modified_base 19: mod_base = OTHER; note = 2'-O-methyl-uridine-3'-phosphate
tcttaatttacagggcact

SEQ ID NO: 1318 - RNA, 19 nt, synthetic construct
  source 1..19: mol_type = other RNA
  modified_base 1: mod_base = OTHER; note = 2'-O-methyl-cytidine-3'-phosphorothioate
  modified_base 2: mod_base = OTHER; note = 2'-O-methyl-uridine-3'-phosphorothioate
  modified_base 3: mod_base = OTHER; note = 2'-O-methyl-uridine-3'-phosphate
  modified_base 4: mod_base = OTHER; note = 2'-O-methyl-adenosine-3'-phosphate
  modified_base 5: mod_base = OTHER; note = 2'-deoxy-2'-fluoro-adenosine-3'-phosphate
  modified_base 6: mod_base = OTHER; note = 2'-O-methyl-uridine-3'-phosphate
  modified_base 7: mod_base = OTHER; note = 2'-deoxy-2'-fluoro-uridine-3'-phosphate
  modified_base 8: mod_base = OTHER; note = 2'-deoxy-2'-fluoro-uridine-3'-phosphate
  modified_base 9: mod_base = OTHER; note = 2'-deoxy-2'-fluoro-adenosine-3'-phosphate
  modified_base 10: mod_base = OTHER; note = 2'-O-methyl-cytidine-3'-phosphate
  modified_base 11: mod_base = OTHER; note = 2'-O-methyl-adenosine-3'-phosphate
  modified_base 12: mod_base = OTHER; note = 2'-O-methyl-guanosine-3'-phosphate
  modified_base 13: mod_base = OTHER; note = 2'-O-methyl-guanosine-3'-phosphate
  modified_base 14: mod_base = OTHER; note = 2'-O-methyl-guanosine-3'-phosphate
  modified_base 15: mod_base = OTHER; note = 2'-O-methyl-cytidine-3'-phosphate
  modified_base 16: mod_base = OTHER; note = 2'-O-methyl-adenosine-3'-phosphate
  modified_base 17: mod_base = OTHER; note = 2'-O-methyl-cytidine-3'-phosphate
  modified_base 18: mod_base = OTHER; note = 2'-O-methyl-uridine-3'-phosphate
  modified_base 19: mod_base = OTHER; note = 2'-O-methyl-adenosine-3'-phosphate
cttaatttacagggcacta

SEQ ID NO: 1319 - RNA, 19 nt, synthetic construct
  source 1..19: mol_type = other RNA
  modified_base 1: mod_base = OTHER; note = 2'-O-methyl-adenosine-3'-phosphorothioate
  modified_base 2: mod_base = OTHER; note = 2'-O-methyl-cytidine-3'-phosphorothioate
  modified_base 3: mod_base = OTHER; note = 2'-O-methyl-adenosine-3'-phosphate
  modified_base 4: mod_base = OTHER; note = 2'-O-methyl-guanosine-3'-phosphate
  modified_base 5: mod_base = OTHER; note = 2'-deoxy-2'-fluoro-adenosine-3'-phosphate
  modified_base 6: mod_base = OTHER; note = 2'-O-methyl-adenosine-3'-phosphate
  modified_base 7: mod_base = OTHER; note = 2'-deoxy-2'-fluoro-uridine-3'-phosphate
  modified_base 8: mod_base = OTHER; note = 2'-deoxy-2'-fluoro-cytidine-3'-phosphate
  modified_base 9: mod_base = OTHER; note = 2'-deoxy-2'-fluoro-uridine-3'-phosphate
  modified_base 10: mod_base = OTHER; note = 2'-O-methyl-adenosine-3'-phosphate
  modified_base 11: mod_base = OTHER; note = 2'-O-methyl-uridine-3'-phosphate
  modified_base 12: mod_base = OTHER; note = 2'-O-methyl-uridine-3'-phosphate
  modified_base 13: mod_base = OTHER; note = 2'-O-methyl-uridine-3'-phosphate
  modified_base 14: mod_base = OTHER; note = 2'-O-methyl-adenosine-3'-phosphate
  modified_base 15: mod_base = OTHER; note = 2'-O-methyl-uridine-3'-phosphate
  modified_base 16: mod_base = OTHER; note = 2'-O-methyl-cytidine-3'-phosphate
  modified_base 17: mod_base = OTHER; note = 2'-O-methyl-adenosine-3'-phosphate
  modified_base 18: mod_base = OTHER; note = 2'-O-methyl-adenosine-3'-phosphate
  modified_base 19: mod_base = OTHER; note = 2'-O-methyl-uridine-3'-phosphate
acagaatctatttatcaat

SEQ ID NO: 1320 - RNA, 19 nt, synthetic construct
  source 1..19: mol_type = other RNA
  modified_base 1: mod_base = OTHER; note = 2'-O-methyl-uridine-3'-phosphorothioate
  modified_base 2: mod_base = OTHER; note = 2'-O-methyl-guanosine-3'-phosphorothioate
  modified_base 3: mod_base = OTHER; note = 2'-O-methyl-adenosine-3'-phosphate
  modified_base 4: mod_base = OTHER; note = 2'-O-methyl-guanosine-3'-phosphate
  modified_base 5: mod_base = OTHER; note = 2'-deoxy-2'-fluoro-guanosine-3'-phosphate
  modified_base 6: mod_base = OTHER; note = 2'-O-methyl-adenosine-3'-phosphate
  modified_base 7: mod_base = OTHER; note = 2'-deoxy-2'-fluoro-uridine-3'-phosphate
  modified_base 8: mod_base = OTHER; note = 2'-deoxy-2'-fluoro-uridine-3'-phosphate
  modified_base 9: mod_base = OTHER; note = 2'-deoxy-2'-fluoro-adenosine-3'-phosphate
  modified_base 10: mod_base = OTHER; note = 2'-O-methyl-cytidine-3'-phosphate
  modified_base 11: mod_base = OTHER; note = 2'-O-methyl-adenosine-3'-phosphate
  modified_base 12: mod_base = OTHER; note = 2'-O-methyl-guanosine-3'-phosphate
  modified_base 13: mod_base = OTHER; note = 2'-O-methyl-adenosine-3'-phosphate
  modified_base 14: mod_base = OTHER; note = 2'-O-methyl-adenosine-3'-phosphate
  modified_base 15: mod_base = OTHER; note = 2'-O-methyl-uridine-3'-phosphate
  modified_base 16: mod_base = OTHER; note = 2'-O-methyl-adenosine-3'-phosphate
  modified_base 17: mod_base = OTHER; note = 2'-O-methyl-cytidine-3'-phosphate
  modified_base 18: mod_base = OTHER; note = 2'-O-methyl-uridine-3'-phosphate
  modified_base 19: mod_base = OTHER; note = 2'-O-methyl-adenosine-3'-phosphate
tgaggattacagaatacta

SEQ ID NO: 1321 - RNA, 19 nt, synthetic construct
  source 1..19: mol_type = other RNA
  modified_base 1: mod_base = OTHER; note = 2'-O-methyl-uridine-3'-phosphorothioate
  modified_base 2: mod_base = OTHER; note = 2'-O-methyl-uridine-3'-phosphorothioate
  modified_base 3: mod_base = OTHER; note = 2'-O-methyl-cytidine-3'-phosphate
  modified_base 4: mod_base = OTHER; note = 2'-O-methyl-uridine-3'-phosphate
  modified_base 5: mod_base = OTHER; note = 2'-deoxy-2'-fluoro-uridine-3'-phosphate
  modified_base 6: mod_base = OTHER; note = 2'-O-methyl-uridine-3'-phosphate
  modified_base 7: mod_base = OTHER; note = 2'-deoxy-2'-fluoro-adenosine-3'-phosphate
  modified_base 8: mod_base = OTHER; note = 2'-deoxy-2'-fluoro-adenosine-3'-phosphate
  modified_base 9: mod_base = OTHER; note = 2'-deoxy-2'-fluoro-uridine-3'-phosphate
  modified_base 10: mod_base = OTHER; note = 2'-O-methyl-adenosine-3'-phosphate
  modified_base 11: mod_base = OTHER; note = 2'-O-methyl-cytidine-3'-phosphate
  modified_base 12: mod_base = OTHER; note = 2'-O-methyl-uridine-3'-phosphate
  modified_base 13: mod_base = OTHER; note = 2'-O-methyl-adenosine-3'-phosphate
  modified_base 14: mod_base = OTHER; note = 2'-O-methyl-adenosine-3'-phosphate
  modified_base 15: mod_base = OTHER; note = 2'-O-methyl-guanosine-3'-phosphate
  modified_base 16: mod_base = OTHER; note = 2'-O-methyl-uridine-3'-phosphate
  modified_base 17: mod_base = OTHER; note = 2'-O-methyl-adenosine-3'-phosphate
  modified_base 18: mod_base = OTHER; note = 2'-O-methyl-uridine-3'-phosphate
  modified_base 19: mod_base = OTHER; note = 2'-O-methyl-uridine-3'-phosphate
ttctttaatactaagtatt

SEQ ID NO: 1322 - RNA, 19 nt, synthetic construct
  source 1..19: mol_type = other RNA
  modified_base 1: mod_base = OTHER; note = 2'-O-methyl-uridine-3'-phosphorothioate
  modified_base 2: mod_base = OTHER; note = 2'-O-methyl-cytidine-3'-phosphorothioate
  modified_base 3: mod_base = OTHER; note = 2'-O-methyl-uridine-3'-phosphate
  modified_base 4: mod_base = OTHER; note = 2'-O-methyl-cytidine-3'-phosphate
  modified_base 5: mod_base = OTHER; note = 2'-deoxy-2'-fluoro-cytidine-3'-phosphate
  modified_base 6: mod_base = OTHER; note = 2'-O-methyl-adenosine-3'-phosphate
  modified_base 7: mod_base = OTHER; note = 2'-deoxy-2'-fluoro-adenosine-3'-phosphate
  modified_base 8: mod_base = OTHER; note = 2'-deoxy-2'-fluoro-adenosine-3'-phosphate
  modified_base 9: mod_base = OTHER; note = 2'-deoxy-2'-fluoro-uridine-3'-phosphate
  modified_base 10: mod_base = OTHER; note = 2'-O-methyl-adenosine-3'-phosphate
  modified_base 11: mod_base = OTHER; note = 2'-O-methyl-uridine-3'-phosphate
  modified_base 12: mod_base = OTHER; note = 2'-O-methyl-uridine-3'-phosphate
  modified_base 13: mod_base = OTHER; note = 2'-O-methyl-adenosine-3'-phosphate
  modified_base 14: mod_base = OTHER; note = 2'-O-methyl-adenosine-3'-phosphate
  modified_base 15: mod_base = OTHER; note = 2'-O-methyl-cytidine-3'-phosphate
  modified_base 16: mod_base = OTHER; note = 2'-O-methyl-uridine-3'-phosphate
  modified_base 17: mod_base = OTHER; note = 2'-O-methyl-adenosine-3'-phosphate
  modified_base 18: mod_base = OTHER; note = 2'-O-methyl-adenosine-3'-phosphate
  modified_base 19: mod_base = OTHER; note = 2'-O-methyl-uridine-3'-phosphate
tctccaaatattaactaat

SEQ ID NO: 1323 - RNA, 19 nt, synthetic construct
  source 1..19: mol_type = other RNA
  modified_base 1: mod_base = OTHER; note = 2'-O-methyl-uridine-3'-phosphorothioate
  modified_base 2: mod_base = OTHER; note = 2'-O-methyl-adenosine-3'-phosphorothioate
  modified_base 3: mod_base = OTHER; note = 2'-O-methyl-guanosine-3'-phosphate
  modified_base 4: mod_base = OTHER; note = 2'-O-methyl-adenosine-3'-phosphate
  modified_base 5: mod_base = OTHER; note = 2'-deoxy-2'-fluoro-guanosine-3'-phosphate
  modified_base 6: mod_base = OTHER; note = 2'-O-methyl-guanosine-3'-phosphate
  modified_base 7: mod_base = OTHER; note = 2'-deoxy-2'-fluoro-adenosine-3'-phosphate
  modified_base 8: mod_base = OTHER; note = 2'-deoxy-2'-fluoro-uridine-3'-phosphate
  modified_base 9: mod_base = OTHER; note = 2'-deoxy-2'-fluoro-guanosine-3'-phosphate
  modified_base 10: mod_base = OTHER; note = 2'-O-methyl-uridine-3'-phosphate
  modified_base 11: mod_base = OTHER; note = 2'-O-methyl-guanosine-3'-phosphate
  modified_base 12: mod_base = OTHER; note = 2'-O-methyl-uridine-3'-phosphate
  modified_base 13: mod_base = OTHER; note = 2'-O-methyl-adenosine-3'-phosphate
  modified_base 14: mod_base = OTHER; note = 2'-O-methyl-adenosine-3'-phosphate
  modified_base 15: mod_base = OTHER; note = 2'-O-methyl-uridine-3'-phosphate
  modified_base 16: mod_base = OTHER; note = 2'-O-methyl-uridine-3'-phosphate
  modified_base 17: mod_base = OTHER; note = 2'-O-methyl-adenosine-3'-phosphate
  modified_base 18: mod_base = OTHER; note = 2'-O-methyl-adenosine-3'-phosphate
  modified_base 19: mod_base = OTHER; note = 2'-O-methyl-cytidine-3'-phosphate
tagaggatgtgtaattaac

SEQ ID NO: 1324 - RNA, 19 nt, synthetic construct
  source 1..19: mol_type = other RNA
  modified_base 1: mod_base = OTHER; note = 2'-O-methyl-adenosine-3'-phosphorothioate
  modified_base 2: mod_base = OTHER; note = 2'-O-methyl-adenosine-3'-phosphorothioate
  modified_base 3: mod_base = OTHER; note = 2'-O-methyl-uridine-3'-phosphate
  modified_base 4: mod_base = OTHER; note = 2'-O-methyl-uridine-3'-phosphate
  modified_base 5: mod_base = OTHER; note = 2'-deoxy-2'-fluoro-uridine-3'-phosphate
  modified_base 6: mod_base = OTHER; note = 2'-O-methyl-adenosine-3'-phosphate
  modified_base 7: mod_base = OTHER; note = 2'-deoxy-2'-fluoro-adenosine-3'-phosphate
  modified_base 8: mod_base = OTHER; note = 2'-deoxy-2'-fluoro-guanosine-3'-phosphate
  modified_base 9: mod_base = OTHER; note = 2'-deoxy-2'-fluoro-uridine-3'-phosphate
  modified_base 10: mod_base = OTHER; note = 2'-O-methyl-uridine-3'-phosphate
  modified_base 11: mod_base = OTHER; note = 2'-O-methyl-guanosine-3'-phosphate
  modified_base 12: mod_base = OTHER; note = 2'-O-methyl-adenosine-3'-phosphate
  modified_base 13: mod_base = OTHER; note = 2'-O-methyl-cytidine-3'-phosphate
  modified_base 14: mod_base = OTHER; note = 2'-O-methyl-uridine-3'-phosphate
  modified_base 15: mod_base = OTHER; note = 2'-O-methyl-adenosine-3'-phosphate
  modified_base 16: mod_base = OTHER; note = 2'-O-methyl-adenosine-3'-phosphate
  modified_base 17: mod_base = OTHER; note = 2'-O-methyl-adenosine-3'-phosphate
  modified_base 18: mod_base = OTHER; note = 2'-O-methyl-guanosine-3'-phosphate
  modified_base 19: mod_base = OTHER; note = 2'-O-methyl-uridine-3'-phosphate
aatttaagttgactaaagt

SEQ ID NO: 1325 - RNA, 19 nt, synthetic construct
  source 1..19: mol_type = other RNA
  modified_base 1: mod_base = OTHER; note = 2'-O-methyl-uridine-3'-phosphorothioate
  modified_base 2: mod_base = OTHER; note = 2'-O-methyl-guanosine-3'-phosphorothioate
  modified_base 3: mod_base = OTHER; note = 2'-O-methyl-uridine-3'-phosphate
  modified_base 4: mod_base = OTHER; note = 2'-O-methyl-guanosine-3'-phosphate
  modified_base 5: mod_base = OTHER; note = 2'-deoxy-2'-fluoro-adenosine-3'-phosphate
  modified_base 6: mod_base = OTHER; note = 2'-O-methyl-guanosine-3'-phosphate
  modified_base 7: mod_base = OTHER; note = 2'-deoxy-2'-fluoro-guanosine-3'-phosphate
  modified_base 8: mod_base = OTHER; note = 2'-deoxy-2'-fluoro-adenosine-3'-phosphate
  modified_base 9: mod_base = OTHER; note = 2'-deoxy-2'-fluoro-uridine-3'-phosphate
  modified_base 10: mod_base = OTHER; note = 2'-O-methyl-uridine-3'-phosphate
  modified_base 11: mod_base = OTHER; note = 2'-O-methyl-adenosine-3'-phosphate
  modified_base 12: mod_base = OTHER; note = 2'-O-methyl-cytidine-3'-phosphate
  modified_base 13: mod_base = OTHER; note = 2'-O-methyl-adenosine-3'-phosphate
  modified_base 14: mod_base = OTHER; note = 2'-O-methyl-guanosine-3'-phosphate
  modified_base 15: mod_base = OTHER; note = 2'-O-methyl-adenosine-3'-phosphate
  modified_base 16: mod_base = OTHER; note = 2'-O-methyl-adenosine-3'-phosphate
  modified_base 17: mod_base = OTHER; note = 2'-O-methyl-uridine-3'-phosphate
  modified_base 18: mod_base = OTHER; note = 2'-O-methyl-adenosine-3'-phosphate
  modified_base 19: mod_base = OTHER; note = 2'-O-methyl-cytidine-3'-phosphate
tgtgaggattacagaatac

SEQ ID NO: 1326 - RNA, 19 nt, synthetic construct
  source 1..19: mol_type = other RNA
  modified_base 1: mod_base = OTHER; note = 2'-O-methyl-uridine-3'-phosphorothioate
  modified_base 2: mod_base = OTHER; note = 2'-O-methyl-uridine-3'-phosphorothioate
  modified_base 3: mod_base = OTHER; note = 2'-O-methyl-cytidine-3'-phosphate
  modified_base 4: mod_base = OTHER; note = 2'-O-methyl-adenosine-3'-phosphate
  modified_base 5: mod_base = OTHER; note = 2'-deoxy-2'-fluoro-uridine-3'-phosphate
  modified_base 6: mod_base = OTHER; note = 2'-O-methyl-adenosine-3'-phosphate
  modified_base 7: mod_base = OTHER; note = 2'-deoxy-2'-fluoro-cytidine-3'-phosphate
  modified_base 8: mod_base = OTHER; note = 2'-deoxy-2'-fluoro-adenosine-3'-phosphate
  modified_base 9: mod_base = OTHER; note = 2'-deoxy-2'-fluoro-adenosine-3'-phosphate
  modified_base 10: mod_base = OTHER; note = 2'-O-methyl-cytidine-3'-phosphate
  modified_base 11: mod_base = OTHER; note = 2'-O-methyl-adenosine-3'-phosphate
  modified_base 12: mod_base = OTHER; note = 2'-O-methyl-cytidine-3'-phosphate
  modified_base 13: mod_base = OTHER; note = 2'-O-methyl-adenosine-3'-phosphate
  modified_base 14: mod_base = OTHER; note = 2'-O-methyl-adenosine-3'-phosphate
  modified_base 15: mod_base = OTHER; note = 2'-O-methyl-uridine-3'-phosphate
  modified_base 16: mod_base = OTHER; note = 2'-O-methyl-adenosine-3'-phosphate
  modified_base 17: mod_base = OTHER; note = 2'-O-methyl-cytidine-3'-phosphate
  modified_base 18: mod_base = OTHER; note = 2'-O-methyl-uridine-3'-phosphate
  modified_base 19: mod_base = OTHER; note = 2'-O-methyl-cytidine-3'-phosphate
ttcatacaacacaatactc

SEQ ID NO: 1327 - RNA, 19 nt, synthetic construct
  source 1..19: mol_type = other RNA
  modified_base 1: mod_base = OTHER; note = 2'-O-methyl-cytidine-3'-phosphorothioate
  modified_base 2: mod_base = OTHER; note = 2'-O-methyl-uridine-3'-phosphorothioate
  modified_base 3: mod_base = OTHER; note = 2'-O-methyl-cytidine-3'-phosphate
  modified_base 4: mod_base = OTHER; note = 2'-O-methyl-cytidine-3'-phosphate
  modified_base 5: mod_base = OTHER; note = 2'-deoxy-2'-fluoro-adenosine-3'-phosphate
  modified_base 6: mod_base = OTHER; note = 2'-O-methyl-adenosine-3'-phosphate
  modified_base 7: mod_base = OTHER; note = 2'-deoxy-2'-fluoro-adenosine-3'-phosphate
  modified_base 8: mod_base = OTHER; note = 2'-deoxy-2'-fluoro-uridine-3'-phosphate
  modified_base 9: mod_base = OTHER; note = 2'-deoxy-2'-fluoro-adenosine-3'-phosphate
  modified_base 10: mod_base = OTHER; note = 2'-O-methyl-uridine-3'-phosphate
  modified_base 11: mod_base = OTHER; note = 2'-O-methyl-uridine-3'-phosphate
  modified_base 12: mod_base = OTHER; note = 2'-O-methyl-adenosine-3'-phosphate
  modified_base 13: mod_base = OTHER; note = 2'-O-methyl-adenosine-3'-phosphate
  modified_base 14: mod_base = OTHER; note = 2'-O-methyl-cytidine-3'-phosphate
  modified_base 15: mod_base = OTHER; note = 2'-O-methyl-uridine-3'-phosphate
  modified_base 16: mod_base = OTHER; note = 2'-O-methyl-adenosine-3'-phosphate
  modified_base 17: mod_base = OTHER; note = 2'-O-methyl-adenosine-3'-phosphate
  modified_base 18: mod_base = OTHER; note = 2'-O-methyl-uridine-3'-phosphate
  modified_base 19: mod_base = OTHER; note = 2'-O-methyl-uridine-3'-phosphate
ctccaaatattaactaatt

SEQ ID NO: 1328 - RNA, 19 nt, synthetic construct
  source 1..19: mol_type = other RNA
  modified_base 1: mod_base = OTHER; note = 2'-O-methyl-cytidine-3'-phosphorothioate
  modified_base 2: mod_base = OTHER; note = 2'-O-methyl-adenosine-3'-phosphorothioate
  modified_base 3: mod_base = OTHER; note = 2'-O-methyl-uridine-3'-phosphate
  modified_base 4: mod_base = OTHER; note = 2'-O-methyl-adenosine-3'-phosphate
  modified_base 5: mod_base = OTHER; note = 2'-deoxy-2'-fluoro-uridine-3'-phosphate
  modified_base 6: mod_base = OTHER; note = 2'-O-methyl-cytidine-3'-phosphate
  modified_base 7: mod_base = OTHER; note = 2'-deoxy-2'-fluoro-adenosine-3'-phosphate
  modified_base 8: mod_base = OTHER; note = 2'-deoxy-2'-fluoro-cytidine-3'-phosphate
  modified_base 9: mod_base = OTHER; note = 2'-deoxy-2'-fluoro-uridine-3'-phosphate
  modified_base 10: mod_base = OTHER; note = 2'-O-methyl-adenosine-3'-phosphate
  modified_base 11: mod_base = OTHER; note = 2'-O-methyl-adenosine-3'-phosphate
  modified_base 12: mod_base = OTHER; note = 2'-O-methyl-uridine-3'-phosphate
  modified_base 13: mod_base = OTHER; note = 2'-O-methyl-adenosine-3'-phosphate
  modified_base 14: mod_base = OTHER; note = 2'-O-methyl-uridine-3'-phosphate
  modified_base 15: mod_base = OTHER; note = 2'-O-methyl-adenosine-3'-phosphate
  modified_base 16: mod_base = OTHER; note = 2'-O-methyl-cytidine-3'-phosphate
  modified_base 17: mod_base = OTHER; note = 2'-O-methyl-uridine-3'-phosphate
  modified_base 18: mod_base = OTHER; note = 2'-O-methyl-adenosine-3'-phosphate
  modified_base 19: mod_base = OTHER; note = 2'-O-methyl-adenosine-3'-phosphate
catatcactaatatactaa

SEQ ID NO: 1329 - RNA, 19 nt, synthetic construct
  source 1..19: mol_type = other RNA
  modified_base 1: mod_base = OTHER; note = 2'-O-methyl-adenosine-3'-phosphorothioate
  modified_base 2: mod_base = OTHER; note = 2'-O-methyl-uridine-3'-phosphorothioate
  modified_base 3: mod_base = OTHER; note = 2'-O-methyl-uridine-3'-phosphate
  modified_base 4: mod_base = OTHER; note = 2'-O-methyl-adenosine-3'-phosphate
  modified_base 5: mod_base = OTHER; note = 2'-deoxy-2'-fluoro-guanosine-3'-phosphate
  modified_base 6: mod_base = OTHER; note = 2'-O-methyl-uridine-3'-phosphate
  modified_base 7: mod_base = OTHER; note = 2'-deoxy-2'-fluoro-cytidine-3'-phosphate
  modified_base 8: mod_base = OTHER; note = 2'-deoxy-2'-fluoro-adenosine-3'-phosphate
  modified_base 9: mod_base = OTHER; note = 2'-deoxy-2'-fluoro-uridine-3'-phosphate
  modified_base 10: mod_base = OTHER; note = 2'-O-methyl-adenosine-3'-phosphate
  modified_base 11: mod_base = OTHER; note = 2'-O-methyl-uridine-3'-phosphate
  modified_base 12: mod_base = OTHER; note = 2'-O-methyl-cytidine-3'-phosphate
  modified_base 13: mod_base = OTHER; note = 2'-O-methyl-adenosine-3'-phosphate
  modified_base 14: mod_base = OTHER; note = 2'-O-methyl-cytidine-3'-phosphate
  modified_base 15: mod_base = OTHER; note = 2'-O-methyl-uridine-3'-phosphate
  modified_base 16: mod_base = OTHER; note = 2'-O-methyl-adenosine-3'-phosphate
  modified_base 17: mod_base = OTHER; note = 2'-O-methyl-adenosine-3'-phosphate
  modified_base 18: mod_base = OTHER; note = 2'-O-methyl-uridine-3'-phosphate
  modified_base 19: mod_base = OTHER; note = 2'-O-methyl-adenosine-3'-phosphate
attagtcatatcactaata

SEQ ID NO: 1330 - RNA, 19 nt, synthetic construct
  source 1..19: mol_type = other RNA
  modified_base 1: mod_base = OTHER; note = 2'-O-methyl-guanosine-3'-phosphorothioate
  modified_base 2: mod_base = OTHER; note = 2'-O-methyl-adenosine-3'-phosphorothioate
  modified_base 3: mod_base = OTHER; note = 2'-O-methyl-adenosine-3'-phosphate
  modified_base 4: mod_base = OTHER; note = 2'-O-methyl-uridine-3'-phosphate
  modified_base 5: mod_base = OTHER; note = 2'-deoxy-2'-fluoro-cytidine-3'-phosphate
  modified_base 6: mod_base = OTHER; note = 2'-O-methyl-uridine-3'-phosphate
  modified_base 7: mod_base = OTHER; note = 2'-deoxy-2'-fluoro-adenosine-3'-phosphate
  modified_base 8: mod_base = OTHER; note = 2'-deoxy-2'-fluoro-uridine-3'-phosphate
  modified_base 9: mod_base = OTHER; note = 2'-deoxy-2'-fluoro-uridine-3'-phosphate
  modified_base 10: mod_base = OTHER; note = 2'-O-methyl-uridine-3'-phosphate
  modified_base 11: mod_base = OTHER; note = 2'-O-methyl-adenosine-3'-phosphate
  modified_base 12: mod_base = OTHER; note = 2'-O-methyl-uridine-3'-phosphate
  modified_base 13: mod_base = OTHER; note = 2'-O-methyl-cytidine-3'-phosphate
  modified_base 14: mod_base = OTHER; note = 2'-O-methyl-adenosine-3'-phosphate
  modified_base 15: mod_base = OTHER; note = 2'-O-methyl-adenosine-3'-phosphate
  modified_base 16: mod_base = OTHER; note = 2'-O-methyl-uridine-3'-phosphate
  modified_base 17: mod_base = OTHER; note = 2'-O-methyl-uridine-3'-phosphate
  modified_base 18: mod_base = OTHER; note = 2'-O-methyl-uridine-3'-phosphate
  modified_base 19: mod_base = OTHER; note = 2'-O-methyl-cytidine-3'-phosphate
gaatctatttatcaatttc

SEQ ID NO: 1331 - RNA, 19 nt, synthetic construct
  source 1..19: mol_type = other RNA
  modified_base 1: mod_base = OTHER; note = 2'-O-methyl-adenosine-3'-phosphorothioate
  modified_base 2: mod_base = OTHER; note = 2'-O-methyl-adenosine-3'-phosphorothioate
  modified_base 3: mod_base = OTHER; note = 2'-O-methyl-uridine-3'-phosphate
  modified_base 4: mod_base = OTHER; note = 2'-O-methyl-uridine-3'-phosphate
  modified_base 5: mod_base = OTHER; note = 2'-deoxy-2'-fluoro-adenosine-3'-phosphate
  modified_base 6: mod_base = OTHER; note = 2'-O-methyl-adenosine-3'-phosphate
  modified_base 7: mod_base = OTHER; note = 2'-deoxy-2'-fluoro-cytidine-3'-phosphate
  modified_base 8: mod_base = OTHER; note = 2'-deoxy-2'-fluoro-cytidine-3'-phosphate
  modified_base 9: mod_base = OTHER; note = 2'-deoxy-2'-fluoro-adenosine-3'-phosphate
  modified_base 10: mod_base = OTHER; note = 2'-O-methyl-uridine-3'-phosphate
  modified_base 11: mod_base = OTHER; note = 2'-O-methyl-adenosine-3'-phosphate
  modified_base 12: mod_base = OTHER; note = 2'-O-methyl-uridine-3'-phosphate
  modified_base 13: mod_base = OTHER; note = 2'-O-methyl-cytidine-3'-phosphate
  modified_base 14: mod_base = OTHER; note = 2'-O-methyl-uridine-3'-phosphate
  modified_base 15: mod_base = OTHER; note = 2'-O-methyl-uridine-3'-phosphate
  modified_base 16: mod_base = OTHER; note = 2'-O-methyl-cytidine-3'-phosphate
  modified_base 17: mod_base = OTHER; note = 2'-O-methyl-uridine-3'-phosphate
  modified_base 18: mod_base = OTHER; note = 2'-O-methyl-adenosine-3'-phosphate
  modified_base 19: mod_base = OTHER; note = 2'-O-methyl-adenosine-3'-phosphate
aattaaccatatcttctaa

SEQ ID NO: 1332 - RNA, 19 nt, synthetic construct
  source 1..19: mol_type = other RNA
  modified_base 1: mod_base = OTHER; note = 2'-O-methyl-guanosine-3'-phosphorothioate
  modified_base 2: mod_base = OTHER; note = 2'-O-methyl-uridine-3'-phosphorothioate
  modified_base 3: mod_base = OTHER; note = 2'-O-methyl-adenosine-3'-phosphate
  modified_base 4: mod_base = OTHER; note = 2'-O-methyl-guanosine-3'-phosphate
  modified_base 5: mod_base = OTHER; note = 2'-deoxy-2'-fluoro-adenosine-3'-phosphate
  modified_base 6: mod_base = OTHER; note = 2'-O-methyl-guanosine-3'-phosphate
  modified_base 7: mod_base = OTHER; note = 2'-deoxy-2'-fluoro-guanosine-3'-phosphate
  modified_base 8: mod_base = OTHER; note = 2'-deoxy-2'-fluoro-adenosine-3'-phosphate
  modified_base 9: mod_base = OTHER; note = 2'-deoxy-2'-fluoro-uridine-3'-phosphate
  modified_base 10: mod_base = OTHER; note = 2'-O-methyl-guanosine-3'-phosphate
  modified_base 11: mod_base = OTHER; note = 2'-O-methyl-uridine-3'-phosphate
  modified_base 12: mod_base = OTHER; note = 2'-O-methyl-guanosine-3'-phosphate
  modified_base 13: mod_base = OTHER; note = 2'-O-methyl-uridine-3'-phosphate
  modified_base 14: mod_base = OTHER; note = 2'-O-methyl-adenosine-3'-phosphate
  modified_base 15: mod_base = OTHER; note = 2'-O-methyl-adenosine-3'-phosphate
  modified_base 16: mod_base = OTHER; note = 2'-O-methyl-uridine-3'-phosphate
  modified_base 17: mod_base = OTHER; note = 2'-O-methyl-uridine-3'-phosphate
  modified_base 18: mod_base = OTHER; note = 2'-O-methyl-adenosine-3'-phosphate
  modified_base 19: mod_base = OTHER; note = 2'-O-methyl-adenosine-3'-phosphate
gtagaggatgtgtaattaa

SEQ ID NO: 1333 - RNA, 19 nt, synthetic construct
  source 1..19: mol_type = other RNA
  modified_base 1: mod_base = OTHER; note = 2'-O-methyl-adenosine-3'-phosphorothioate
  modified_base 2: mod_base = OTHER; note = 2'-O-methyl-guanosine-3'-phosphorothioate
  modified_base 3: mod_base = OTHER; note = 2'-O-methyl-adenosine-3'-phosphate
  modified_base 4: mod_base = OTHER; note = 2'-O-methyl-adenosine-3'-phosphate
  modified_base 5: mod_base = OTHER; note = 2'-deoxy-2'-fluoro-adenosine-3'-phosphate
  modified_base 6: mod_base = OTHER; note = 2'-O-methyl-guanosine-3'-phosphate
  modified_base 7: mod_base = OTHER; note = 2'-deoxy-2'-fluoro-uridine-3'-phosphate
  modified_base 8: mod_base = OTHER; note = 2'-deoxy-2'-fluoro-cytidine-3'-phosphate
  modified_base 9: mod_base = OTHER; note = 2'-deoxy-2'-fluoro-cytidine-3'-phosphate
  modified_base 10: mod_base = OTHER; note = 2'-O-methyl-adenosine-3'-phosphate
  modified_base 11: mod_base = OTHER; note = 2'-O-methyl-adenosine-3'-phosphate
  modified_base 12: mod_base = OTHER; note = 2'-O-methyl-uridine-3'-phosphate
  modified_base 13: mod_base = OTHER; note = 2'-O-methyl-adenosine-3'-phosphate
  modified_base 14: mod_base = OTHER; note = 2'-O-methyl-cytidine-3'-phosphate
  modified_base 15: mod_base = OTHER; note = 2'-O-methyl-cytidine-3'-phosphate
  modified_base 16: mod_base = OTHER; note = 2'-O-methyl-uridine-3'-phosphate
  modified_base 17: mod_base = OTHER; note = 2'-O-methyl-cytidine-3'-phosphate
  modified_base 18: mod_base = OTHER; note = 2'-O-methyl-adenosine-3'-phosphate
  modified_base 19: mod_base = OTHER; note = 2'-O-methyl-cytidine-3'-phosphate
agaaagtccaatacctcac

SEQ ID NO: 1334 - RNA, 19 nt, synthetic construct
  source 1..19: mol_type = other RNA
  modified_base 1: mod_base = OTHER; note = 2'-O-methyl-adenosine-3'-phosphorothioate
  modified_base 2: mod_base = OTHER; note = 2'-O-methyl-adenosine-3'-phosphorothioate
  modified_base 3: mod_base = OTHER; note = 2'-O-methyl-cytidine-3'-phosphate
  modified_base 4: mod_base = OTHER; note = 2'-O-methyl-uridine-3'-phosphate
  modified_base 5: mod_base = OTHER; note = 2'-deoxy-2'-fluoro-uridine-3'-phosphate
  modified_base 6: mod_base = OTHER; note = 2'-O-methyl-uridine-3'-phosphate
  modified_base 7: mod_base = OTHER; note = 2'-deoxy-2'-fluoro-guanosine-3'-phosphate
  modified_base 8: mod_base = OTHER; note = 2'-deoxy-2'-fluoro-guanosine-3'-phosphate
  modified_base 9: mod_base = OTHER; note = 2'-deoxy-2'-fluoro-uridine-3'-phosphate
  modified_base 10: mod_base = OTHER; note = 2'-O-methyl-adenosine-3'-phosphate
  modified_base 11: mod_base = OTHER; note = 2'-O-methyl-adenosine-3'-phosphate
  modified_base 12: mod_base = OTHER; note = 2'-O-methyl-uridine-3'-phosphate
  modified_base 13: mod_base = OTHER; note = 2'-O-methyl-uridine-3'-phosphate
  modified_base 14: mod_base = OTHER; note = 2'-O-methyl-uridine-3'-phosphate
  modified_base 15: mod_base = OTHER; note = 2'-O-methyl-adenosine-3'-phosphate
  modified_base 16: mod_base = OTHER; note = 2'-O-methyl-adenosine-3'-phosphate
  modified_base 17: mod_base = OTHER; note = 2'-O-methyl-guanosine-3'-phosphate
  modified_base 18: mod_base = OTHER; note = 2'-O-methyl-uridine-3'-phosphate
  modified_base 19: mod_base = OTHER; note = 2'-O-methyl-uridine-3'-phosphate
aactttggtaatttaagtt

SEQ ID NO: 1335 - RNA, 19 nt, synthetic construct
  source 1..19: mol_type = other RNA
  modified_base 1: mod_base = OTHER; note = 2'-O-methyl-cytidine-3'-phosphorothioate
  modified_base 2: mod_base = OTHER; note = 2'-O-methyl-uridine-3'-phosphorothioate
  modified_base 3: mod_base = OTHER; note = 2'-O-methyl-cytidine-3'-phosphate
  modified_base 4: mod_base = OTHER; note = 2'-O-methyl-uridine-3'-phosphate
  modified_base 5: mod_base = OTHER; note = 2'-deoxy-2'-fluoro-cytidine-3'-phosphate
  modified_base 6: mod_base = OTHER; note = 2'-O-methyl-cytidine-3'-phosphate
  modified_base 7: mod_base = OTHER; note = 2'-deoxy-2'-fluoro-adenosine-3'-phosphate
  modified_base 8: mod_base = OTHER; note = 2'-deoxy-2'-fluoro-adenosine-3'-phosphate
  modified_base 9: mod_base = OTHER; note = 2'-deoxy-2'-fluoro-adenosine-3'-phosphate
  modified_base 10: mod_base = OTHER; note = 2'-O-methyl-uridine-3'-phosphate
  modified_base 11: mod_base = OTHER; note = 2'-O-methyl-adenosine-3'-phosphate
  modified_base 12: mod_base = OTHER; note = 2'-O-methyl-uridine-3'-phosphate
  modified_base 13: mod_base = OTHER; note = 2'-O-methyl-uridine-3'-phosphate
  modified_base 14: mod_base = OTHER; note = 2'-O-methyl-adenosine-3'-phosphate
  modified_base 15: mod_base = OTHER; note = 2'-O-methyl-adenosine-3'-phosphate
  modified_base 16: mod_base = OTHER; note = 2'-O-methyl-cytidine-3'-phosphate
  modified_base 17: mod_base = OTHER; note = 2'-O-methyl-uridine-3'-phosphate
  modified_base 18: mod_base = OTHER; note = 2'-O-methyl-adenosine-3'-phosphate
  modified_base 19: mod_base = OTHER; note = 2'-O-methyl-adenosine-3'-phosphate
ctctccaaatattaactaa

SEQ ID NO: 1336 - RNA, 19 nt, synthetic construct
  source 1..19: mol_type = other RNA
  modified_base 1: mod_base = OTHER; note = 2'-O-methyl-adenosine-3'-phosphorothioate
  modified_base 2: mod_base = OTHER; note = 2'-O-methyl-uridine-3'-phosphorothioate
  modified_base 3: mod_base = OTHER; note = 2'-O-methyl-adenosine-3'-phosphate
  modified_base 4: mod_base = OTHER; note = 2'-O-methyl-guanosine-3'-phosphate
  modified_base 5: mod_base = OTHER; note = 2'-deoxy-2'-fluoro-adenosine-3'-phosphate
  modified_base 6: mod_base = OTHER; note = 2'-O-methyl-adenosine-3'-phosphate
  modified_base 7: mod_base = OTHER; note = 2'-deoxy-2'-fluoro-uridine-3'-phosphate
  modified_base 8: mod_base = OTHER; note = 2'-deoxy-2'-fluoro-adenosine-3'-phosphate
  modified_base 9: mod_base = OTHER; note = 2'-deoxy-2'-fluoro-adenosine-3'-phosphate
  modified_base 10: mod_base = OTHER; note = 2'-O-methyl-guanosine-3'-phosphate
  modified_base 11: mod_base = OTHER; note = 2'-O-methyl-uridine-3'-phosphate
  modified_base 12: mod_base = OTHER; note = 2'-O-methyl-uridine-3'-phosphate
  modified_base 13: mod_base = OTHER; note = 2'-O-methyl-cytidine-3'-phosphate
  modified_base 14: mod_base = OTHER; note = 2'-O-methyl-uridine-3'-phosphate
  modified_base 15: mod_base = OTHER; note = 2'-O-methyl-uridine-3'-phosphate
  modified_base 16: mod_base = OTHER; note = 2'-O-methyl-adenosine-3'-phosphate
  modified_base 17: mod_base = OTHER; note = 2'-O-methyl-uridine-3'-phosphate
  modified_base 18: mod_base = OTHER; note = 2'-O-methyl-cytidine-3'-phosphate
  modified_base 19: mod_base = OTHER; note = 2'-O-methyl-uridine-3'-phosphate
atagaataagttcttatct

SEQ ID NO: 1337 - RNA, 19 nt, synthetic construct
  source 1..19: mol_type = other RNA
  modified_base 1: mod_base = OTHER; note = 2'-O-methyl-uridine-3'-phosphorothioate
  modified_base 2: mod_base = OTHER; note = 2'-O-methyl-adenosine-3'-phosphorothioate
  modified_base 3: mod_base = OTHER; note = 2'-O-methyl-uridine-3'-phosphate
  modified_base 4: mod_base = OTHER; note = 2'-O-methyl-cytidine-3'-phosphate
  modified_base 5: mod_base = OTHER; note = 2'-deoxy-2'-fluoro-adenosine-3'-phosphate
  modified_base 6: mod_base = OTHER; note = 2'-O-methyl-cytidine-3'-phosphate
  modified_base 7: mod_base = OTHER; note = 2'-deoxy-2'-fluoro-uridine-3'-phosphate
  modified_base 8: mod_base = OTHER; note = 2'-deoxy-2'-fluoro-adenosine-3'-phosphate
  modified_base 9: mod_base = OTHER; note = 2'-deoxy-2'-fluoro-adenosine-3'-phosphate
  modified_base 10: mod_base = OTHER; note = 2'-O-methyl-uridine-3'-phosphate
  modified_base 11: mod_base = OTHER; note = 2'-O-methyl-adenosine-3'-phosphate
  modified_base 12: mod_base = OTHER; note = 2'-O-methyl-uridine-3'-phosphate
  modified_base 13: mod_base = OTHER; note = 2'-O-methyl-adenosine-3'-phosphate
  modified_base 14: mod_base = OTHER; note = 2'-O-methyl-cytidine-3'-phosphate
  modified_base 15: mod_base = OTHER; note = 2'-O-methyl-uridine-3'-phosphate
  modified_base 16: mod_base = OTHER; note = 2'-O-methyl-adenosine-3'-phosphate
  modified_base 17: mod_base = OTHER; note = 2'-O-methyl-adenosine-3'-phosphate
  modified_base 18: mod_base = OTHER; note = 2'-O-methyl-cytidine-3'-phosphate
  modified_base 19: mod_base = OTHER; note = 2'-O-methyl-adenosine-3'-phosphate
tatcactaatatactaaca

SEQ ID NO: 1338 - RNA, 19 nt, synthetic construct
  source 1..19: mol_type = other RNA
  modified_base 1: mod_base = OTHER; note = 2'-O-methyl-guanosine-3'-phosphorothioate
  modified_base 2: mod_base = OTHER; note = 2'-O-methyl-adenosine-3'-phosphorothioate
  modified_base 3: mod_base = OTHER; note = 2'-O-methyl-guanosine-3'-phosphate
  modified_base 4: mod_base = OTHER; note = 2'-O-methyl-guanosine-3'-phosphate
  modified_base 5: mod_base = OTHER; note = 2'-deoxy-2'-fluoro-adenosine-3'-phosphate
  modified_base 6: mod_base = OTHER; note = 2'-O-methyl-uridine-3'-phosphate
  modified_base 7: mod_base = OTHER; note = 2'-deoxy-2'-fluoro-guanosine-3'-phosphate
  modified_base 8: mod_base = OTHER; note = 2'-deoxy-2'-fluoro-uridine-3'-phosphate
  modified_base 9: mod_base = OTHER; note = 2'-deoxy-2'-fluoro-guanosine-3'-phosphate
  modified_base 10: mod_base = OTHER; note = 2'-O-methyl-uridine-3'-phosphate
  modified_base 11: mod_base = OTHER; note = 2'-O-methyl-adenosine-3'-phosphate
  modified_base 12: mod_base = OTHER; note = 2'-O-methyl-adenosine-3'-phosphate
  modified_base 13: mod_base = OTHER; note = 2'-O-methyl-uridine-3'-phosphate
  modified_base 14: mod_base = OTHER; note = 2'-O-methyl-uridine-3'-phosphate
  modified_base 15: mod_base = OTHER; note = 2'-O-methyl-adenosine-3'-phosphate
  modified_base 16: mod_base = OTHER; note = 2'-O-methyl-adenosine-3'-phosphate
  modified_base 17: mod_base = OTHER; note = 2'-O-methyl-cytidine-3'-phosphate
  modified_base 18: mod_base = OTHER; note = 2'-O-methyl-cytidine-3'-phosphate
  modified_base 19: mod_base = OTHER; note = 2'-O-methyl-adenosine-3'-phosphate
gaggatgtgtaattaacca

SEQ ID NO: 1339 - RNA, 19 nt, synthetic construct
  source 1..19: mol_type = other RNA
  modified_base 1: mod_base = OTHER; note = 2'-O-methyl-guanosine-3'-phosphorothioate
  modified_base 2: mod_base = OTHER; note = 2'-O-methyl-adenosine-3'-phosphorothioate
  modified_base 3: mod_base = OTHER; note = 2'-O-methyl-adenosine-3'-phosphate
  modified_base 4: mod_base = OTHER; note = 2'-O-methyl-uridine-3'-phosphate
  modified_base 5: mod_base = OTHER; note = 2'-deoxy-2'-fluoro-adenosine-3'-phosphate
  modified_base 6: mod_base = OTHER; note = 2'-O-methyl-cytidine-3'-phosphate
  modified_base 7: mod_base = OTHER; note = 2'-deoxy-2'-fluoro-uridine-3'-phosphate
  modified_base 8: mod_base = OTHER; note = 2'-deoxy-2'-fluoro-adenosine-3'-phosphate
  modified_base 9: mod_base = OTHER; note = 2'-deoxy-2'-fluoro-uridine-3'-phosphate
  modified_base 10: mod_base = OTHER; note = 2'-O-methyl-adenosine-3'-phosphate
  modified_base 11: mod_base = OTHER; note = 2'-O-methyl-adenosine-3'-phosphate
  modified_base 12: mod_base = OTHER; note = 2'-O-methyl-cytidine-3'-phosphate
  modified_base 13: mod_base = OTHER; note = 2'-O-methyl-uridine-3'-phosphate
  modified_base 14: mod_base = OTHER; note = 2'-O-methyl-cytidine-3'-phosphate
  modified_base 15: mod_base = OTHER; note = 2'-O-methyl-adenosine-3'-phosphate
  modified_base 16: mod_base = OTHER; note = 2'-O-methyl-adenosine-3'-phosphate
  modified_base 17: mod_base = OTHER; note = 2'-O-methyl-adenosine-3'-phosphate
  modified_base 18: mod_base = OTHER; note = 2'-O-methyl-uridine-3'-phosphate
  modified_base 19: mod_base = OTHER; note = 2'-O-methyl-uridine-3'-phosphate
gaatactataactcaaatt

SEQ ID NO: 1340 - RNA, 19 nt, synthetic construct
  source 1..19: mol_type = other RNA
  modified_base 1: mod_base = OTHER; note = 2'-O-methyl-cytidine-3'-phosphorothioate
  modified_base 2: mod_base = OTHER; note = 2'-O-methyl-uridine-3'-phosphorothioate
  modified_base 3: mod_base = OTHER; note = 2'-O-methyl-guanosine-3'-phosphate
  modified_base 4: mod_base = OTHER; note = 2'-O-methyl-cytidine-3'-phosphate
  modified_base 5: mod_base = OTHER; note = 2'-deoxy-2'-fluoro-uridine-3'-phosphate
  modified_base 6: mod_base = OTHER; note = 2'-O-methyl-adenosine-3'-phosphate
  modified_base 7: mod_base = OTHER; note = 2'-deoxy-2'-fluoro-cytidine-3'-phosphate
  modified_base 8: mod_base = OTHER; note = 2'-deoxy-2'-fluoro-adenosine-3'-phosphate
  modified_base 9: mod_base = OTHER; note = 2'-deoxy-2'-fluoro-adenosine-3'-phosphate
  modified_base 10: mod_base = OTHER; note = 2'-O-methyl-cytidine-3'-phosphate
  modified_base 11: mod_base = OTHER; note = 2'-O-methyl-cytidine-3'-phosphate
  modified_base 12: mod_base = OTHER; note = 2'-O-methyl-uridine-3'-phosphate
  modified_base 13: mod_base = OTHER; note = 2'-O-methyl-cytidine-3'-phosphate
  modified_base 14: mod_base = OTHER; note = 2'-O-methyl-uridine-3'-phosphate
  modified_base 15: mod_base = OTHER; note = 2'-O-methyl-adenosine-3'-phosphate
  modified_base 16: mod_base = OTHER; note = 2'-O-methyl-guanosine-3'-phosphate
  modified_base 17: mod_base = OTHER; note = 2'-O-methyl-adenosine-3'-phosphate
  modified_base 18: mod_base = OTHER; note = 2'-O-methyl-uridine-3'-phosphate
  modified_base 19: mod_base = OTHER; note = 2'-O-methyl-cytidine-3'-phosphate
ctgctacaacctctagatc

SEQ ID NO: 1341 - RNA, 19 nt, synthetic construct
  source 1..19: mol_type = other RNA
  modified_base 1: mod_base = OTHER; note = 2'-O-methyl-cytidine-3'-phosphorothioate
  modified_base 2: mod_base = OTHER; note = 2'-O-methyl-uridine-3'-phosphorothioate
  modified_base 3: mod_base = OTHER; note = 2'-O-methyl-adenosine-3'-phosphate
  modified_base 4: mod_base = OTHER; note = 2'-O-methyl-uridine-3'-phosphate
  modified_base 5: mod_base = OTHER; note = 2'-deoxy-2'-fluoro-uridine-3'-phosphate
  modified_base 6: mod_base = OTHER; note = 2'-O-methyl-uridine-3'-phosphate
  modified_base 7: mod_base = OTHER; note = 2'-deoxy-2'-fluoro-adenosine-3'-phosphate
  modified_base 8: mod_base = OTHER; note = 2'-deoxy-2'-fluoro-uridine-3'-phosphate
  modified_base 9: mod_base = OTHER; note = 2'-deoxy-2'-fluoro-cytidine-3'-phosphate
  modified_base 10: mod_base = OTHER; note = 2'-O-methyl-adenosine-3'-phosphate
  modified_base 11: mod_base = OTHER; note = 2'-O-methyl-adenosine-3'-phosphate
  modified_base 12: mod_base = OTHER; note = 2'-O-methyl-uridine-3'-phosphate
  modified_base 13: mod_base = OTHER; note = 2'-O-methyl-uridine-3'-phosphate
  modified_base 14: mod_base = OTHER; note = 2'-O-methyl-uridine-3'-phosphate
  modified_base 15: mod_base = OTHER; note = 2'-O-methyl-cytidine-3'-phosphate
  modified_base 16: mod_base = OTHER; note = 2'-O-methyl-uridine-3'-phosphate
  modified_base 17: mod_base = OTHER; note = 2'-O-methyl-guanosine-3'-phosphate
  modified_base 18: mod_base = OTHER; note = 2'-O-methyl-uridine-3'-phosphate
  modified_base 19: mod_base = OTHER; note = 2'-O-methyl-cytidine-3'-phosphate
ctatttatcaatttctgtc

SEQ ID NO: 1342 - RNA, 19 nt, synthetic construct
  source 1..19: mol_type = other RNA
  modified_base 1: mod_base = OTHER; note = 2'-O-methyl-guanosine-3'-phosphorothioate
  modified_base 2: mod_base = OTHER; note = 2'-O-methyl-adenosine-3'-phosphorothioate
  modified_base 3: mod_base = OTHER; note = 2'-O-methyl-adenosine-3'-phosphate
  modified_base 4: mod_base = OTHER; note = 2'-O-methyl-guanosine-3'-phosphate
  modified_base 5: mod_base = OTHER; note = 2'-deoxy-2'-fluoro-adenosine-3'-phosphate
  modified_base 6: mod_base = OTHER; note = 2'-O-methyl-cytidine-3'-phosphate
  modified_base 7: mod_base = OTHER; note = 2'-deoxy-2'-fluoro-adenosine-3'-phosphate
  modified_base 8: mod_base = OTHER; note = 2'-deoxy-2'-fluoro-uridine-3'-phosphate
  modified_base 9: mod_base = OTHER; note = 2'-deoxy-2'-fluoro-guanosine-3'-phosphate
  modified_base 10: mod_base = OTHER; note = 2'-O-methyl-uridine-3'-phosphate
  modified_base 11: mod_base = OTHER; note = 2'-O-methyl-uridine-3'-phosphate
  modified_base 12: mod_base = OTHER; note = 2'-O-methyl-adenosine-3'-phosphate
  modified_base 13: mod_base = OTHER; note = 2'-O-methyl-cytidine-3'-phosphate
  modified_base 14: mod_base = OTHER; note = 2'-O-methyl-uridine-3'-phosphate
  modified_base 15: mod_base = OTHER; note = 2'-O-methyl-adenosine-3'-phosphate
  modified_base 16: mod_base = OTHER; note = 2'-O-methyl-adenosine-3'-phosphate
  modified_base 17: mod_base = OTHER; note = 2'-O-methyl-uridine-3'-phosphate
  modified_base 18: mod_base = OTHER; note = 2'-O-methyl-adenosine-3'-phosphate
  modified_base 19: mod_base = OTHER; note = 2'-O-methyl-uridine-3'-phosphate
gaagacatgttactaatat

SEQ ID NO: 1343 - RNA, 19 nt, synthetic construct
  source 1..19: mol_type = other RNA
  modified_base 1: mod_base = OTHER; note = 2'-O-methyl-uridine-3'-phosphorothioate
  modified_base 2: mod_base = OTHER; note = 2'-O-methyl-cytidine-3'-phosphorothioate
  modified_base 3: mod_base = OTHER; note = 2'-O-methyl-uridine-3'-phosphate
  modified_base 4: mod_base = OTHER; note = 2'-O-methyl-cytidine-3'-phosphate
  modified_base 5: mod_base = OTHER; note = 2'-deoxy-2'-fluoro-uridine-3'-phosphate
  modified_base 6: mod_base = OTHER; note = 2'-O-methyl-cytidine-3'-phosphate
  modified_base 7: mod_base = OTHER; note = 2'-deoxy-2'-fluoro-cytidine-3'-phosphate
  modified_base 8: mod_base = OTHER; note = 2'-deoxy-2'-fluoro-adenosine-3'-phosphate
  modified_base 9: mod_base = OTHER; note = 2'-deoxy-2'-fluoro-adenosine-3'-phosphate
  modified_base 10: mod_base = OTHER; note = 2'-O-methyl-adenosine-3'-phosphate
  modified_base 11: mod_base = OTHER; note = 2'-O-methyl-uridine-3'-phosphate
  modified_base 12: mod_base = OTHER; note = 2'-O-methyl-adenosine-3'-phosphate
  modified_base 13: mod_base = OTHER; note = 2'-O-methyl-uridine-3'-phosphate
  modified_base 14: mod_base = OTHER; note = 2'-O-methyl-uridine-3'-phosphate
  modified_base 15: mod_base = OTHER; note = 2'-O-methyl-adenosine-3'-phosphate
  modified_base 16: mod_base = OTHER; note = 2'-O-methyl-adenosine-3'-phosphate
  modified_base 17: mod_base = OTHER; note = 2'-O-methyl-cytidine-3'-phosphate
  modified_base 18: mod_base = OTHER; note = 2'-O-methyl-uridine-3'-phosphate
  modified_base 19: mod_base = OTHER; note = 2'-O-methyl-adenosine-3'-phosphate
tctctccaaatattaacta

SEQ ID NO: 1344 - RNA, 19 nt, synthetic construct
  source 1..19: mol_type = other RNA
  modified_base 1: mod_base = OTHER; note = 2'-O-methyl-uridine-3'-phosphorothioate
  modified_base 2: mod_base = OTHER; note = 2'-O-methyl-guanosine-3'-phosphorothioate
  modified_base 3: mod_base = OTHER; note = 2'-O-methyl-cytidine-3'-phosphate
  modified_base 4: mod_base = OTHER; note = 2'-O-methyl-uridine-3'-phosphate
  modified_base 5: mod_base = OTHER; note = 2'-deoxy-2'-fluoro-adenosine-3'-phosphate
  modified_base 6: mod_base = OTHER; note = 2'-O-methyl-cytidine-3'-phosphate
  modified_base 7: mod_base = OTHER; note = 2'-deoxy-2'-fluoro-adenosine-3'-phosphate
  modified_base 8: mod_base = OTHER; note = 2'-deoxy-2'-fluoro-adenosine-3'-phosphate
  modified_base 9: mod_base = OTHER; note = 2'-deoxy-2'-fluoro-cytidine-3'-phosphate
  modified_base 10: mod_base = OTHER; note = 2'-O-methyl-cytidine-3'-phosphate
  modified_base 11: mod_base = OTHER; note = 2'-O-methyl-uridine-3'-phosphate
  modified_base 12: mod_base = OTHER; note = 2'-O-methyl-cytidine-3'-phosphate
  modified_base 13: mod_base = OTHER; note = 2'-O-methyl-uridine-3'-phosphate
  modified_base 14: mod_base = OTHER; note = 2'-O-methyl-adenosine-3'-phosphate
  modified_base 15: mod_base = OTHER; note = 2'-O-methyl-guanosine-3'-phosphate
  modified_base 16: mod_base = OTHER; note = 2'-O-methyl-adenosine-3'-phosphate
  modified_base 17: mod_base = OTHER; note = 2'-O-methyl-uridine-3'-phosphate
  modified_base 18: mod_base = OTHER; note = 2'-O-methyl-cytidine-3'-phosphate
  modified_base 19: mod_base = OTHER; note = 2'-O-methyl-uridine-3'-phosphate
tgctacaacctctagatct

SEQ ID NO: 1345 - RNA, 19 nt, synthetic construct
  source 1..19: mol_type = other RNA
  modified_base 1: mod_base = OTHER; note = 2'-O-methyl-cytidine-3'-phosphorothioate
  modified_base 2: mod_base = OTHER; note = 2'-O-methyl-adenosine-3'-phosphorothioate
  modified_base 3: mod_base = OTHER; note = 2'-O-methyl-uridine-3'-phosphate
  modified_base 4: mod_base = OTHER; note = 2'-O-methyl-guanosine-3'-phosphate
  modified_base 5: mod_base = OTHER; note = 2'-deoxy-2'-fluoro-guanosine-3'-phosphate
  modified_base 6: mod_base = OTHER; note = 2'-O-methyl-adenosine-3'-phosphate
  modified_base 7: mod_base = OTHER; note = 2'-deoxy-2'-fluoro-guanosine-3'-phosphate
  modified_base 8: mod_base = OTHER; note = 2'-deoxy-2'-fluoro-adenosine-3'-phosphate
  modified_base 9: mod_base = OTHER; note = 2'-deoxy-2'-fluoro-adenosine-3'-phosphate
  modified_base 10: mod_base = OTHER; note = 2'-O-methyl-adenosine-3'-phosphate
  modified_base 11: mod_base = OTHER; note = 2'-O-methyl-guanosine-3'-phosphate
  modified_base 12: mod_base = OTHER; note = 2'-O-methyl-uridine-3'-phosphate
  modified_base 13: mod_base = OTHER; note = 2'-O-methyl-cytidine-3'-phosphate
  modified_base 14: mod_base = OTHER; note = 2'-O-methyl-cytidine-3'-phosphate
  modified_base 15: mod_base = OTHER; note = 2'-O-methyl-adenosine-3'-phosphate
  modified_base 16: mod_base = OTHER; note = 2'-O-methyl-adenosine-3'-phosphate
  modified_base 17: mod_base = OTHER; note = 2'-O-methyl-uridine-3'-phosphate
  modified_base 18: mod_base = OTHER; note = 2'-O-methyl-adenosine-3'-phosphate
  modified_base 19: mod_base = OTHER; note = 2'-O-methyl-cytidine-3'-phosphate
catggagaaagtccaatac

SEQ ID NO: 1346 - RNA, 19 nt, synthetic construct
  source 1..19: mol_type = other RNA
  modified_base 1: mod_base = OTHER; note = 2'-O-methyl-adenosine-3'-phosphorothioate
  modified_base 2: mod_base = OTHER; note = 2'-O-methyl-cytidine-3'-phosphorothioate
  modified_base 3: mod_base = OTHER; note = 2'-O-methyl-uridine-3'-phosphate
  modified_base 4: mod_base = OTHER; note = 2'-O-methyl-adenosine-3'-phosphate
  modified_base 5: mod_base = OTHER; note = 2'-deoxy-2'-fluoro-uridine-3'-phosphate
  modified_base 6: mod_base = OTHER; note = 2'-O-methyl-cytidine-3'-phosphate
  modified_base 7: mod_base = OTHER; note = 2'-deoxy-2'-fluoro-adenosine-3'-phosphate
  modified_base 8: mod_base = OTHER; note = 2'-deoxy-2'-fluoro-guanosine-3'-phosphate
  modified_base 9: mod_base = OTHER; note = 2'-deoxy-2'-fluoro-adenosine-3'-phosphate
  modified_base 10: mod_base = OTHER; note = 2'-O-methyl-adenosine-3'-phosphate
  modified_base 11: mod_base = OTHER; note = 2'-O-methyl-uridine-3'-phosphate
  modified_base 12: mod_base = OTHER; note = 2'-O-methyl-cytidine-3'-phosphate
  modified_base 13: mod_base = OTHER; note = 2'-O-methyl-uridine-3'-phosphate
  modified_base 14: mod_base = OTHER; note = 2'-O-methyl-adenosine-3'-phosphate
  modified_base 15: mod_base = OTHER; note = 2'-O-methyl-cytidine-3'-phosphate
  modified_base 16: mod_base = OTHER; note = 2'-O-methyl-adenosine-3'-phosphate
  modified_base 17: mod_base = OTHER; note = 2'-O-methyl-uridine-3'-phosphate
  modified_base 18: mod_base = OTHER; note = 2'-O-methyl-uridine-3'-phosphate
  modified_base 19: mod_base = OTHER; note = 2'-O-methyl-cytidine-3'-phosphate
actatcagaatctacattc

SEQ ID NO: 1347 - RNA, 19 nt, synthetic construct
  source 1..19: mol_type = other RNA
  modified_base 1: mod_base = OTHER; note = 2'-O-methyl-uridine-3'-phosphorothioate
  modified_base 2: mod_base = OTHER; note = 2'-O-methyl-cytidine-3'-phosphorothioate
  modified_base 3: mod_base = OTHER; note = 2'-O-methyl-adenosine-3'-phosphate
  modified_base 4: mod_base = OTHER; note = 2'-O-methyl-uridine-3'-phosphate
  modified_base 5: mod_base = OTHER; note = 2'-deoxy-2'-fluoro-guanosine-3'-phosphate
  modified_base 6: mod_base = OTHER; note = 2'-O-methyl-guanosine-3'-phosphate
  modified_base 7: mod_base = OTHER; note = 2'-deoxy-2'-fluoro-adenosine-3'-phosphate
  modified_base 8: mod_base = OTHER; note = 2'-deoxy-2'-fluoro-guanosine-3'-phosphate
  modified_base 9: mod_base = OTHER; note = 2'-deoxy-2'-fluoro-adenosine-3'-phosphate
  modified_base 10: mod_base = OTHER; note = 2'-O-methyl-adenosine-3'-phosphate
  modified_base 11: mod_base = OTHER; note = 2'-O-methyl-adenosine-3'-phosphate
  modified_base 12: mod_base = OTHER; note = 2'-O-methyl-guanosine-3'-phosphate
  modified_base 13: mod_base = OTHER; note = 2'-O-methyl-uridine-3'-phosphate
  modified_base 14: mod_base = OTHER; note = 2'-O-methyl-cytidine-3'-phosphate
  modified_base 15: mod_base = OTHER; note = 2'-O-methyl-cytidine-3'-phosphate
  modified_base 16: mod_base = OTHER; note = 2'-O-methyl-adenosine-3'-phosphate
  modified_base 17: mod_base = OTHER; note = 2'-O-methyl-adenosine-3'-phosphate
  modified_base 18: mod_base = OTHER; note = 2'-O-methyl-uridine-3'-phosphate
  modified_base 19: mod_base = OTHER; note = 2'-O-methyl-adenosine-3'-phosphate
tcatggagaaagtccaata

SEQ ID NO: 1348 - RNA, 19 nt, synthetic construct
  source 1..19: mol_type = other RNA
  modified_base 1: mod_base = OTHER; note = 2'-O-methyl-adenosine-3'-phosphorothioate
  modified_base 2: mod_base = OTHER; note = 2'-O-methyl-uridine-3'-phosphorothioate
  modified_base 3: mod_base = OTHER; note = 2'-O-methyl-adenosine-3'-phosphate
  modified_base 4: mod_base = OTHER; note = 2'-O-methyl-cytidine-3'-phosphate
  modified_base 5: mod_base = OTHER; note = 2'-deoxy-2'-fluoro-cytidine-3'-phosphate
  modified_base 6: mod_base = OTHER; note = 2'-O-methyl-uridine-3'-phosphate
  modified_base 7: mod_base = OTHER; note = 2'-deoxy-2'-fluoro-cytidine-3'-phosphate
  modified_base 8: mod_base = OTHER; note = 2'-deoxy-2'-fluoro-adenosine-3'-phosphate
  modified_base 9: mod_base = OTHER; note = 2'-deoxy-2'-fluoro-cytidine-3'-phosphate
  modified_base 10: mod_base = OTHER; note = 2'-O-methyl-uridine-3'-phosphate
  modified_base 11: mod_base = OTHER; note = 2'-O-methyl-cytidine-3'-phosphate
  modified_base 12: mod_base = OTHER; note = 2'-O-methyl-guanosine-3'-phosphate
  modified_base 13: mod_base = OTHER; note = 2'-O-methyl-cytidine-3'-phosphate
  modified_base 14: mod_base = OTHER; note = 2'-O-methyl-uridine-3'-phosphate
  modified_base 15: mod_base = OTHER; note = 2'-O-methyl-cytidine-3'-phosphate
  modified_base 16: mod_base = OTHER; note = 2'-O-methyl-adenosine-3'-phosphate
  modified_base 17: mod_base = OTHER; note = 2'-O-methyl-guanosine-3'-phosphate
  modified_base 18: mod_base = OTHER; note = 2'-O-methyl-cytidine-3'-phosphate
  modified_base 19: mod_base = OTHER; note = 2'-O-methyl-adenosine-3'-phosphate
atacctcactcgctcagca

SEQ ID NO: 1349 - RNA, 19 nt, synthetic construct
  source 1..19: mol_type = other RNA
  modified_base 1: mod_base = OTHER; note = 2'-O-methyl-uridine-3'-phosphorothioate
  modified_base 2: mod_base = OTHER; note = 2'-O-methyl-adenosine-3'-phosphorothioate
  modified_base 3: mod_base = OTHER; note = 2'-O-methyl-cytidine-3'-phosphate
  modified_base 4: mod_base = OTHER; note = 2'-O-methyl-cytidine-3'-phosphate
  modified_base 5: mod_base = OTHER; note = 2'-deoxy-2'-fluoro-uridine-3'-phosphate
  modified_base 6: mod_base = OTHER; note = 2'-O-methyl-cytidine-3'-phosphate
  modified_base 7: mod_base = OTHER; note = 2'-deoxy-2'-fluoro-adenosine-3'-phosphate
  modified_base 8: mod_base = OTHER; note = 2'-deoxy-2'-fluoro-cytidine-3'-phosphate
  modified_base 9: mod_base = OTHER; note = 2'-deoxy-2'-fluoro-uridine-3'-phosphate
  modified_base 10: mod_base = OTHER; note = 2'-O-methyl-cytidine-3'-phosphate
  modified_base 11: mod_base = OTHER; note = 2'-O-methyl-guanosine-3'-phosphate
  modified_base 12: mod_base = OTHER; note = 2'-O-methyl-cytidine-3'-phosphate
  modified_base 13: mod_base = OTHER; note = 2'-O-methyl-uridine-3'-phosphate
  modified_base 14: mod_base = OTHER; note = 2'-O-methyl-cytidine-3'-phosphate
  modified_base 15: mod_base = OTHER; note = 2'-O-methyl-adenosine-3'-phosphate
  modified_base 16: mod_base = OTHER; note = 2'-O-methyl-guanosine-3'-phosphate
  modified_base 17: mod_base = OTHER; note = 2'-O-methyl-cytidine-3'-phosphate
  modified_base 18: mod_base = OTHER; note = 2'-O-methyl-uridine-3'-phosphate
  modified_base 19: mod_base = OTHER; note = 2'-O-methyl-adenosine-3'-phosphate
tacctcactcgctcagcta

SEQ ID NO: 1350 - RNA, 19 nt, synthetic construct
  source 1..19: mol_type = other RNA
  modified_base 1: mod_base = OTHER; note = 2'-O-methyl-adenosine-3'-phosphorothioate
  modified_base 2: mod_base = OTHER; note = 2'-O-methyl-cytidine-3'-phosphorothioate
  modified_base 3: mod_base = OTHER; note = 2'-O-methyl-cytidine-3'-phosphate
  modified_base 4: mod_base = OTHER; note = 2'-O-methyl-uridine-3'-phosphate
  modified_base 5: mod_base = OTHER; note = 2'-deoxy-2'-fluoro-cytidine-3'-phosphate
  modified_base 6: mod_base = OTHER; note = 2'-O-methyl-adenosine-3'-phosphate
  modified_base 7: mod_base = OTHER; note = 2'-deoxy-2'-fluoro-cytidine-3'-phosphate
  modified_base 8: mod_base = OTHER; note = 2'-deoxy-2'-fluoro-uridine-3'-phosphate
  modified_base 9: mod_base = OTHER; note = 2'-deoxy-2'-fluoro-cytidine-3'-phosphate
  modified_base 10: mod_base = OTHER; note = 2'-O-methyl-guanosine-3'-phosphate
  modified_base 11: mod_base = OTHER; note = 2'-O-methyl-cytidine-3'-phosphate
  modified_base 12: mod_base = OTHER; note = 2'-O-methyl-uridine-3'-phosphate
  modified_base 13: mod_base = OTHER; note = 2'-O-methyl-cytidine-3'-phosphate
  modified_base 14: mod_base = OTHER; note = 2'-O-methyl-adenosine-3'-phosphate
  modified_base 15: mod_base = OTHER; note = 2'-O-methyl-guanosine-3'-phosphate
  modified_base 16: mod_base = OTHER; note = 2'-O-methyl-cytidine-3'-phosphate
  modified_base 17: mod_base = OTHER; note = 2'-O-methyl-uridine-3'-phosphate
  modified_base 18: mod_base = OTHER; note = 2'-O-methyl-adenosine-3'-phosphate
  modified_base 19: mod_base = OTHER; note = 2'-O-methyl-adenosine-3'-phosphate
acctcactcgctcagctaa

SEQ ID NO: 1351 - RNA, 19 nt, synthetic construct
  source 1..19: mol_type = other RNA
  modified_base 1: mod_base = OTHER; note = 2'-O-methyl-uridine-3'-phosphorothioate
  modified_base 2: mod_base = OTHER; note = 2'-O-methyl-guanosine-3'-phosphorothioate
  modified_base 3: mod_base = OTHER; note = 2'-O-methyl-adenosine-3'-phosphate
  modified_base 4: mod_base = OTHER; note = 2'-O-methyl-adenosine-3'-phosphate
  modified_base 5: mod_base = OTHER; note = 2'-deoxy-2'-fluoro-adenosine-3'-phosphate
  modified_base 6: mod_base = OTHER; note = 2'-O-methyl-uridine-3'-phosphate
  modified_base 7: mod_base = OTHER; note = 2'-deoxy-2'-fluoro-guanosine-3'-phosphate
  modified_base 8: mod_base = OTHER; note = 2'-deoxy-2'-fluoro-cytidine-3'-phosphate
  modified_base 9: mod_base = OTHER; note = 2'-deoxy-2'-fluoro-cytidine-3'-phosphate
  modified_base 10: mod_base = OTHER; note = 2'-O-methyl-uridine-3'-phosphate
  modified_base 11: mod_base = OTHER; note = 2'-O-methyl-cytidine-3'-phosphate
  modified_base 12: mod_base = OTHER; note = 2'-O-methyl-adenosine-3'-phosphate
  modified_base 13: mod_base = OTHER; note = 2'-O-methyl-adenosine-3'-phosphate
  modified_base 14: mod_base = OTHER; note = 2'-O-methyl-cytidine-3'-phosphate
  modified_base 15: mod_base = OTHER; note = 2'-O-methyl-adenosine-3'-phosphate
  modified_base 16: mod_base = OTHER; note = 2'-O-methyl-adenosine-3'-phosphate
  modified_base 17: mod_base = OTHER; note = 2'-O-methyl-guanosine-3'-phosphate
  modified_base 18: mod_base = OTHER; note = 2'-O-methyl-cytidine-3'-phosphate
  modified_base 19: mod_base = OTHER; note = 2'-O-methyl-adenosine-3'-phosphate
tgaaatgcctcaacaagca

SEQ ID NO: 1352 - RNA, 19 nt, synthetic construct
  source 1..19: mol_type = other RNA
  modified_base 1: mod_base = OTHER; note = 2'-O-methyl-guanosine-3'-phosphorothioate
  modified_base 2: mod_base = OTHER; note = 2'-O-methyl-adenosine-3'-phosphorothioate
  modified_base 3: mod_base = OTHER; note = 2'-O-methyl-adenosine-3'-phosphate
  modified_base 4: mod_base = OTHER; note = 2'-O-methyl-adenosine-3'-phosphate
  modified_base 5: mod_base = OTHER; note = 2'-deoxy-2'-fluoro-uridine-3'-phosphate
  modified_base 6: mod_base = OTHER; note = 2'-O-methyl-guanosine-3'-phosphate
  modified_base 7: mod_base = OTHER; note = 2'-deoxy-2'-fluoro-cytidine-3'-phosphate
  modified_base 8: mod_base = OTHER; note = 2'-deoxy-2'-fluoro-cytidine-3'-phosphate
  modified_base 9: mod_base = OTHER; note = 2'-deoxy-2'-fluoro-uridine-3'-phosphate
  modified_base 10: mod_base = OTHER; note = 2'-O-methyl-cytidine-3'-phosphate
  modified_base 11: mod_base = OTHER; note = 2'-O-methyl-adenosine-3'-phosphate
  modified_base 12: mod_base = OTHER; note = 2'-O-methyl-adenosine-3'-phosphate
  modified_base 13: mod_base = OTHER; note = 2'-O-methyl-cytidine-3'-phosphate
  modified_base 14: mod_base = OTHER; note = 2'-O-methyl-adenosine-3'-phosphate
  modified_base 15: mod_base = OTHER; note = 2'-O-methyl-adenosine-3'-phosphate
  modified_base 16: mod_base = OTHER; note = 2'-O-methyl-guanosine-3'-phosphate
  modified_base 17: mod_base = OTHER; note = 2'-O-methyl-cytidine-3'-phosphate
  modified_base 18: mod_base = OTHER; note = 2'-O-methyl-adenosine-3'-phosphate
  modified_base 19: mod_base = OTHER; note = 2'-O-methyl-adenosine-3'-phosphate
gaaatgcctcaacaagcaa

SEQ ID NO: 1353 - RNA, 19 nt, synthetic construct
  source 1..19: mol_type = other RNA
  modified_base 1: mod_base = OTHER; note = 2'-O-methyl-adenosine-3'-phosphorothioate
  modified_base 2: mod_base = OTHER; note = 2'-O-methyl-adenosine-3'-phosphorothioate
  modified_base 3: mod_base = OTHER; note = 2'-O-methyl-adenosine-3'-phosphate
  modified_base 4: mod_base = OTHER; note = 2'-O-methyl-uridine-3'-phosphate
  modified_base 5: mod_base = OTHER; note = 2'-deoxy-2'-fluoro-guanosine-3'-phosphate
  modified_base 6: mod_base = OTHER; note = 2'-O-methyl-cytidine-3'-phosphate
  modified_base 7: mod_base = OTHER; note = 2'-deoxy-2'-fluoro-cytidine-3'-phosphate
  modified_base 8: mod_base = OTHER; note = 2'-deoxy-2'-fluoro-uridine-3'-phosphate
  modified_base 9: mod_base = OTHER; note = 2'-deoxy-2'-fluoro-cytidine-3'-phosphate
  modified_base 10: mod_base = OTHER; note = 2'-O-methyl-adenosine-3'-phosphate
  modified_base 11: mod_base = OTHER; note = 2'-O-methyl-adenosine-3'-phosphate
  modified_base 12: mod_base = OTHER; note = 2'-O-methyl-cytidine-3'-phosphate
  modified_base 13: mod_base = OTHER; note = 2'-O-methyl-adenosine-3'-phosphate
  modified_base 14: mod_base = OTHER; note = 2'-O-methyl-adenosine-3'-phosphate
  modified_base 15: mod_base = OTHER; note = 2'-O-methyl-guanosine-3'-phosphate
  modified_base 16: mod_base = OTHER; note = 2'-O-methyl-cytidine-3'-phosphate
  modified_base 17: mod_base = OTHER; note = 2'-O-methyl-adenosine-3'-phosphate
  modified_base 18: mod_base = OTHER; note = 2'-O-methyl-cytidine-3'-phosphate
  modified_base 19: mod_base = OTHER; note = 2'-O-methyl-adenosine-3'-phosphate
aaatgcctcaacaagcaca

SEQ ID NO: 1354 - RNA, 19 nt, synthetic construct
  source 1..19: mol_type = other RNA
  modified_base 1: mod_base = OTHER; note = 2'-O-methyl-adenosine-3'-phosphorothioate
  modified_base 2: mod_base = OTHER; note = 2'-O-methyl-adenosine-3'-phosphorothioate
  modified_base 3: mod_base = OTHER; note = 2'-O-methyl-uridine-3'-phosphate
  modified_base 4: mod_base = OTHER; note = 2'-O-methyl-guanosine-3'-phosphate
  modified_base 5: mod_base = OTHER; note = 2'-deoxy-2'-fluoro-cytidine-3'-phosphate
  modified_base 6: mod_base = OTHER; note = 2'-O-methyl-cytidine-3'-phosphate
  modified_base 7: mod_base = OTHER; note = 2'-deoxy-2'-fluoro-uridine-3'-phosphate
  modified_base 8: mod_base = OTHER; note = 2'-deoxy-2'-fluoro-cytidine-3'-phosphate
  modified_base 9: mod_base = OTHER; note = 2'-deoxy-2'-fluoro-adenosine-3'-phosphate
  modified_base 10: mod_base = OTHER; note = 2'-O-methyl-adenosine-3'-phosphate
  modified_base 11: mod_base = OTHER; note = 2'-O-methyl-cytidine-3'-phosphate
  modified_base 12: mod_base = OTHER; note = 2'-O-methyl-adenosine-3'-phosphate
  modified_base 13: mod_base = OTHER; note = 2'-O-methyl-adenosine-3'-phosphate
  modified_base 14: mod_base = OTHER; note = 2'-O-methyl-guanosine-3'-phosphate
  modified_base 15: mod_base = OTHER; note = 2'-O-methyl-cytidine-3'-phosphate
  modified_base 16: mod_base = OTHER; note = 2'-O-methyl-adenosine-3'-phosphate
  modified_base 17: mod_base = OTHER; note = 2'-O-methyl-cytidine-3'-phosphate
  modified_base 18: mod_base = OTHER; note = 2'-O-methyl-guanosine-3'-phosphate
  modified_base 19: mod_base = OTHER; note = 2'-O-methyl-adenosine-3'-phosphate
aatgcctcaacaagcacga

SEQ ID NO: 1355 - RNA, 19 nt, synthetic construct
  source 1..19: mol_type = other RNA
  modified_base 1: mod_base = OTHER; note = 2'-O-methyl-adenosine-3'-phosphorothioate
  modified_base 2: mod_base = OTHER; note = 2'-O-methyl-uridine-3'-phosphorothioate
  modified_base 3: mod_base = OTHER; note = 2'-O-methyl-guanosine-3'-phosphate
  modified_base 4: mod_base = OTHER; note = 2'-O-methyl-cytidine-3'-phosphate
  modified_base 5: mod_base = OTHER; note = 2'-deoxy-2'-fluoro-cytidine-3'-phosphate
  modified_base 6: mod_base = OTHER; note = 2'-O-methyl-uridine-3'-phosphate
  modified_base 7: mod_base = OTHER; note = 2'-deoxy-2'-fluoro-cytidine-3'-phosphate
  modified_base 8: mod_base = OTHER; note = 2'-deoxy-2'-fluoro-adenosine-3'-phosphate
  modified_base 9: mod_base = OTHER; note = 2'-deoxy-2'-fluoro-adenosine-3'-phosphate
  modified_base 10: mod_base = OTHER; note = 2'-O-methyl-cytidine-3'-phosphate
  modified_base 11: mod_base = OTHER; note = 2'-O-methyl-adenosine-3'-phosphate
  modified_base 12: mod_base = OTHER; note = 2'-O-methyl-adenosine-3'-phosphate
  modified_base 13: mod_base = OTHER; note = 2'-O-methyl-guanosine-3'-phosphate
  modified_base 14: mod_base = OTHER; note = 2'-O-methyl-cytidine-3'-phosphate
  modified_base 15: mod_base = OTHER; note = 2'-O-methyl-adenosine-3'-phosphate
  modified_base 16: mod_base = OTHER; note = 2'-O-methyl-cytidine-3'-phosphate
  modified_base 17: mod_base = OTHER; note = 2'-O-methyl-guanosine-3'-phosphate
  modified_base 18: mod_base = OTHER; note = 2'-O-methyl-uridine-3'-phosphate
  modified_base 19: mod_base = OTHER; note = 2'-O-methyl-adenosine-3'-phosphate
atgcctcaacaagcacgta

SEQ ID NO: 1356 - RNA, 19 nt, synthetic construct
  source 1..19: mol_type = other RNA
  modified_base 1: mod_base = OTHER; note = 2'-O-methyl-uridine-3'-phosphorothioate
  modified_base 2: mod_base = OTHER; note = 2'-O-methyl-guanosine-3'-phosphorothioate
  modified_base 3: mod_base = OTHER; note = 2'-O-methyl-cytidine-3'-phosphate
  modified_base 4: mod_base = OTHER; note = 2'-O-methyl-cytidine-3'-phosphate
  modified_base 5: mod_base = OTHER; note = 2'-deoxy-2'-fluoro-uridine-3'-phosphate
  modified_base 6: mod_base = OTHER; note = 2'-O-methyl-cytidine-3'-phosphate
  modified_base 7: mod_base = OTHER; note = 2'-deoxy-2'-fluoro-adenosine-3'-phosphate
  modified_base 8: mod_base = OTHER; note = 2'-deoxy-2'-fluoro-adenosine-3'-phosphate
  modified_base 9: mod_base = OTHER; note = 2'-deoxy-2'-fluoro-cytidine-3'-phosphate
  modified_base 10: mod_base = OTHER; note = 2'-O-methyl-adenosine-3'-phosphate
  modified_base 11: mod_base = OTHER; note = 2'-O-methyl-adenosine-3'-phosphate
  modified_base 12: mod_base = OTHER; note = 2'-O-methyl-guanosine-3'-phosphate
  modified_base 13: mod_base = OTHER; note = 2'-O-methyl-cytidine-3'-phosphate
  modified_base 14: mod_base = OTHER; note = 2'-O-methyl-adenosine-3'-phosphate
  modified_base 15: mod_base = OTHER; note = 2'-O-methyl-cytidine-3'-phosphate
  modified_base 16: mod_base = OTHER; note = 2'-O-methyl-guanosine-3'-phosphate
  modified_base 17: mod_base = OTHER; note = 2'-O-methyl-uridine-3'-phosphate
  modified_base 18: mod_base = OTHER; note = 2'-O-methyl-cytidine-3'-phosphate
  modified_base 19: mod_base = OTHER; note = 2'-O-methyl-adenosine-3'-phosphate
tgcctcaacaagcacgtca

SEQ ID NO: 1357 - RNA, 19 nt, synthetic construct
  source 1..19: mol_type = other RNA
  modified_base 1: mod_base = OTHER; note = 2'-O-methyl-cytidine-3'-phosphorothioate
  modified_base 2: mod_base = OTHER; note = 2'-O-methyl-cytidine-3'-phosphorothioate
  modified_base 3: mod_base = OTHER; note = 2'-O-methyl-uridine-3'-phosphate
  modified_base 4: mod_base = OTHER; note = 2'-O-methyl-cytidine-3'-phosphate
  modified_base 5: mod_base = OTHER; note = 2'-deoxy-2'-fluoro-adenosine-3'-phosphate
  modified_base 6: mod_base = OTHER; note = 2'-O-methyl-adenosine-3'-phosphate
  modified_base 7: mod_base = OTHER; note = 2'-deoxy-2'-fluoro-cytidine-3'-phosphate
  modified_base 8: mod_base = OTHER; note = 2'-deoxy-2'-fluoro-adenosine-3'-phosphate
  modified_base 9: mod_base = OTHER; note = 2'-deoxy-2'-fluoro-uridine-3'-phosphate
  modified_base 10: mod_base = OTHER; note = 2'-O-methyl-guanosine-3'-phosphate
  modified_base 11: mod_base = OTHER; note = 2'-O-methyl-guanosine-3'-phosphate
  modified_base 12: mod_base = OTHER; note = 2'-O-methyl-cytidine-3'-phosphate
  modified_base 13: mod_base = OTHER; note = 2'-O-methyl-uridine-3'-phosphate
  modified_base 14: mod_base = OTHER; note = 2'-O-methyl-cytidine-3'-phosphate
  modified_base 15: mod_base = OTHER; note = 2'-O-methyl-adenosine-3'-phosphate
  modified_base 16: mod_base = OTHER; note = 2'-O-methyl-cytidine-3'-phosphate
  modified_base 17: mod_base = OTHER; note = 2'-O-methyl-adenosine-3'-phosphate
  modified_base 18: mod_base = OTHER; note = 2'-O-methyl-adenosine-3'-phosphate
  modified_base 19: mod_base = OTHER; note = 2'-O-methyl-adenosine-3'-phosphate
cctcaacatggctcacaaa

SEQ ID NO: 1358 - RNA, 19 nt, synthetic construct
  source 1..19: mol_type = other RNA
  modified_base 1: mod_base = OTHER; note = 2'-O-methyl-cytidine-3'-phosphorothioate
  modified_base 2: mod_base = OTHER; note = 2'-O-methyl-uridine-3'-phosphorothioate
  modified_base 3: mod_base = OTHER; note = 2'-O-methyl-cytidine-3'-phosphate
  modified_base 4: mod_base = OTHER; note = 2'-O-methyl-adenosine-3'-phosphate
  modified_base 5: mod_base = OTHER; note = 2'-deoxy-2'-fluoro-adenosine-3'-phosphate
  modified_base 6: mod_base = OTHER; note = 2'-O-methyl-cytidine-3'-phosphate
  modified_base 7: mod_base = OTHER; note = 2'-deoxy-2'-fluoro-adenosine-3'-phosphate
  modified_base 8: mod_base = OTHER; note = 2'-deoxy-2'-fluoro-uridine-3'-phosphate
  modified_base 9: mod_base = OTHER; note = 2'-deoxy-2'-fluoro-guanosine-3'-phosphate
  modified_base 10: mod_base = OTHER; note = 2'-O-methyl-guanosine-3'-phosphate
  modified_base 11: mod_base = OTHER; note = 2'-O-methyl-cytidine-3'-phosphate
  modified_base 12: mod_base = OTHER; note = 2'-O-methyl-uridine-3'-phosphate
  modified_base 13: mod_base = OTHER; note = 2'-O-methyl-cytidine-3'-phosphate
  modified_base 14: mod_base = OTHER; note = 2'-O-methyl-adenosine-3'-phosphate
  modified_base 15: mod_base = OTHER; note = 2'-O-methyl-cytidine-3'-phosphate
  modified_base 16: mod_base = OTHER; note = 2'-O-methyl-adenosine-3'-phosphate
  modified_base 17: mod_base = OTHER; note = 2'-O-methyl-adenosine-3'-phosphate
  modified_base 18: mod_base = OTHER; note = 2'-O-methyl-adenosine-3'-phosphate
  modified_base 19: mod_base = OTHER; note = 2'-O-methyl-adenosine-3'-phosphate
ctcaacatggctcacaaaa

SEQ ID NO: 1359 - RNA, 19 nt, synthetic construct
  source 1..19: mol_type = other RNA
  modified_base 1: mod_base = OTHER; note = 2'-O-methyl-uridine-3'-phosphorothioate
  modified_base 2: mod_base = OTHER; note = 2'-O-methyl-cytidine-3'-phosphorothioate
  modified_base 3: mod_base = OTHER; note = 2'-O-methyl-adenosine-3'-phosphate
  modified_base 4: mod_base = OTHER; note = 2'-O-methyl-adenosine-3'-phosphate
  modified_base 5: mod_base = OTHER; note = 2'-deoxy-2'-fluoro-cytidine-3'-phosphate
  modified_base 6: mod_base = OTHER; note = 2'-O-methyl-adenosine-3'-phosphate
  modified_base 7: mod_base = OTHER; note = 2'-deoxy-2'-fluoro-uridine-3'-phosphate
  modified_base 8: mod_base = OTHER; note = 2'-deoxy-2'-fluoro-guanosine-3'-phosphate
  modified_base 9: mod_base = OTHER; note = 2'-deoxy-2'-fluoro-guanosine-3'-phosphate
  modified_base 10: mod_base = OTHER; note = 2'-O-methyl-cytidine-3'-phosphate
  modified_base 11: mod_base = OTHER; note = 2'-O-methyl-uridine-3'-phosphate
  modified_base 12: mod_base = OTHER; note = 2'-O-methyl-cytidine-3'-phosphate
  modified_base 13: mod_base = OTHER; note = 2'-O-methyl-adenosine-3'-phosphate
  modified_base 14: mod_base = OTHER; note = 2'-O-methyl-cytidine-3'-phosphate
  modified_base 15: mod_base = OTHER; note = 2'-O-methyl-adenosine-3'-phosphate
  modified_base 16: mod_base = OTHER; note = 2'-O-methyl-adenosine-3'-phosphate
  modified_base 17: mod_base = OTHER; note = 2'-O-methyl-adenosine-3'-phosphate
  modified_base 18: mod_base = OTHER; note = 2'-O-methyl-uridine-3'-phosphate
  modified_base 19: mod_base = OTHER; note = 2'-O-methyl-adenosine-3'-phosphate
tcaacatggctcacaaata

SEQ ID NO: 1360 - RNA, 19 nt, synthetic construct
  source 1..19: mol_type = other RNA
  modified_base 1: mod_base = OTHER; note = 2'-O-methyl-cytidine-3'-phosphorothioate
  modified_base 2: mod_base = OTHER; note = 2'-O-methyl-adenosine-3'-phosphorothioate
  modified_base 3: mod_base = OTHER; note = 2'-O-methyl-adenosine-3'-phosphate
  modified_base 4: mod_base = OTHER; note = 2'-O-methyl-cytidine-3'-phosphate
  modified_base 5: mod_base = OTHER; note = 2'-deoxy-2'-fluoro-adenosine-3'-phosphate
  modified_base 6: mod_base = OTHER; note = 2'-O-methyl-uridine-3'-phosphate
  modified_base 7: mod_base = OTHER; note = 2'-deoxy-2'-fluoro-guanosine-3'-phosphate
  modified_base 8: mod_base = OTHER; note = 2'-deoxy-2'-fluoro-guanosine-3'-phosphate
  modified_base 9: mod_base = OTHER; note = 2'-deoxy-2'-fluoro-cytidine-3'-phosphate
  modified_base 10: mod_base = OTHER; note = 2'-O-methyl-uridine-3'-phosphate
  modified_base 11: mod_base = OTHER; note = 2'-O-methyl-cytidine-3'-phosphate
  modified_base 12: mod_base = OTHER; note = 2'-O-methyl-adenosine-3'-phosphate
  modified_base 13: mod_base = OTHER; note = 2'-O-methyl-cytidine-3'-phosphate
  modified_base 14: mod_base = OTHER; note = 2'-O-methyl-adenosine-3'-phosphate
  modified_base 15: mod_base = OTHER; note = 2'-O-methyl-adenosine-3'-phosphate
  modified_base 16: mod_base = OTHER; note = 2'-O-methyl-adenosine-3'-phosphate
  modified_base 17: mod_base = OTHER; note = 2'-O-methyl-uridine-3'-phosphate
  modified_base 18: mod_base = OTHER; note = 2'-O-methyl-uridine-3'-phosphate
  modified_base 19: mod_base = OTHER; note = 2'-O-methyl-adenosine-3'-phosphate
caacatggctcacaaatta

SEQ ID NO: 1361 - RNA, 19 nt, synthetic construct
  source 1..19: mol_type = other RNA
  modified_base 1: mod_base = OTHER; note = 2'-O-methyl-adenosine-3'-phosphorothioate
  modified_base 2: mod_base = OTHER; note = 2'-O-methyl-guanosine-3'-phosphorothioate
  modified_base 3: mod_base = OTHER; note = 2'-O-methyl-uridine-3'-phosphate
  modified_base 4: mod_base = OTHER; note = 2'-O-methyl-cytidine-3'-phosphate
  modified_base 5: mod_base = OTHER; note = 2'-deoxy-2'-fluoro-cytidine-3'-phosphate
  modified_base 6: mod_base = OTHER; note = 2'-O-methyl-adenosine-3'-phosphate
  modified_base 7: mod_base = OTHER; note = 2'-deoxy-2'-fluoro-adenosine-3'-phosphate
  modified_base 8: mod_base = OTHER; note = 2'-deoxy-2'-fluoro-uridine-3'-phosphate
  modified_base 9: mod_base = OTHER; note = 2'-deoxy-2'-fluoro-adenosine-3'-phosphate
  modified_base 10: mod_base = OTHER; note = 2'-O-methyl-cytidine-3'-phosphate
  modified_base 11: mod_base = OTHER; note = 2'-O-methyl-cytidine-3'-phosphate
  modified_base 12: mod_base = OTHER; note = 2'-O-methyl-uridine-3'-phosphate
  modified_base 13: mod_base = OTHER; note = 2'-O-methyl-cytidine-3'-phosphate
  modified_base 14: mod_base = OTHER; note = 2'-O-methyl-adenosine-3'-phosphate
  modified_base 15: mod_base = OTHER; note = 2'-O-methyl-cytidine-3'-phosphate
  modified_base 16: mod_base = OTHER; note = 2'-O-methyl-uridine-3'-phosphate
  modified_base 17: mod_base = OTHER; note = 2'-O-methyl-cytidine-3'-phosphate
  modified_base 18: mod_base = OTHER; note = 2'-O-methyl-guanosine-3'-phosphate
  modified_base 19: mod_base = OTHER; note = 2'-O-methyl-adenosine-3'-phosphate
agtccaatacctcactcga

SEQ ID NO: 1362 - RNA, 19 nt, synthetic construct
  source 1..19: mol_type = other RNA
  modified_base 1: mod_base = OTHER; note = 2'-O-methyl-guanosine-3'-phosphorothioate
  modified_base 2: mod_base = OTHER; note = 2'-O-methyl-uridine-3'-phosphorothioate
  modified_base 3: mod_base = OTHER; note = 2'-O-methyl-cytidine-3'-phosphate
  modified_base 4: mod_base = OTHER; note = 2'-O-methyl-cytidine-3'-phosphate
  modified_base 5: mod_base = OTHER; note = 2'-deoxy-2'-fluoro-adenosine-3'-phosphate
  modified_base 6: mod_base = OTHER; note = 2'-O-methyl-adenosine-3'-phosphate
  modified_base 7: mod_base = OTHER; note = 2'-deoxy-2'-fluoro-uridine-3'-phosphate
  modified_base 8: mod_base = OTHER; note = 2'-deoxy-2'-fluoro-adenosine-3'-phosphate
  modified_base 9: mod_base = OTHER; note = 2'-deoxy-2'-fluoro-cytidine-3'-phosphate
  modified_base 10: mod_base = OTHER; note = 2'-O-methyl-cytidine-3'-phosphate
  modified_base 11: mod_base = OTHER; note = 2'-O-methyl-uridine-3'-phosphate
  modified_base 12: mod_base = OTHER; note = 2'-O-methyl-cytidine-3'-phosphate
  modified_base 13: mod_base = OTHER; note = 2'-O-methyl-adenosine-3'-phosphate
  modified_base 14: mod_base = OTHER; note = 2'-O-methyl-cytidine-3'-phosphate
  modified_base 15: mod_base = OTHER; note = 2'-O-methyl-uridine-3'-phosphate
  modified_base 16: mod_base = OTHER; note = 2'-O-methyl-cytidine-3'-phosphate
  modified_base 17: mod_base = OTHER; note = 2'-O-methyl-guanosine-3'-phosphate
  modified_base 18: mod_base = OTHER; note = 2'-O-methyl-cytidine-3'-phosphate
  modified_base 19: mod_base = OTHER; note = 2'-O-methyl-adenosine-3'-phosphate
gtccaatacctcactcgca

SEQ ID NO: 1363 - RNA, 19 nt, synthetic construct
  source 1..19: mol_type = other RNA
  modified_base 1: mod_base = OTHER; note = 2'-O-methyl-cytidine-3'-phosphorothioate
  modified_base 2: mod_base = OTHER; note = 2'-O-methyl-cytidine-3'-phosphorothioate
  modified_base 3: mod_base = OTHER; note = 2'-O-methyl-adenosine-3'-phosphate
  modified_base 4: mod_base = OTHER; note = 2'-O-methyl-adenosine-3'-phosphate
  modified_base 5: mod_base = OTHER; note = 2'-deoxy-2'-fluoro-uridine-3'-phosphate
  modified_base 6: mod_base = OTHER; note = 2'-O-methyl-adenosine-3'-phosphate
  modified_base 7: mod_base = OTHER; note = 2'-deoxy-2'-fluoro-cytidine-3'-phosphate
  modified_base 8: mod_base = OTHER; note = 2'-deoxy-2'-fluoro-cytidine-3'-phosphate
  modified_base 9: mod_base = OTHER; note = 2'-deoxy-2'-fluoro-uridine-3'-phosphate
  modified_base 10: mod_base = OTHER; note = 2'-O-methyl-cytidine-3'-phosphate
  modified_base 11: mod_base = OTHER; note = 2'-O-methyl-adenosine-3'-phosphate
  modified_base 12: mod_base = OTHER; note = 2'-O-methyl-cytidine-3'-phosphate
  modified_base 13: mod_base = OTHER; note = 2'-O-methyl-uridine-3'-phosphate
  modified_base 14: mod_base = OTHER; note = 2'-O-methyl-cytidine-3'-phosphate
  modified_base 15: mod_base = OTHER; note = 2'-O-methyl-guanosine-3'-phosphate
  modified_base 16: mod_base = OTHER; note = 2'-O-methyl-cytidine-3'-phosphate
  modified_base 17: mod_base = OTHER; note = 2'-O-methyl-uridine-3'-phosphate
  modified_base 18: mod_base = OTHER; note = 2'-O-methyl-cytidine-3'-phosphate
  modified_base 19: mod_base = OTHER; note = 2'-O-methyl-adenosine-3'-phosphate
ccaatacctcactcgctca

SEQ ID NO: 1364 - RNA, 19 nt, synthetic construct
  source 1..19: mol_type = other RNA
  modified_base 1: mod_base = OTHER; note = 2'-O-methyl-cytidine-3'-phosphorothioate
  modified_base 2: mod_base = OTHER; note = 2'-O-methyl-adenosine-3'-phosphorothioate
  modified_base 3: mod_base = OTHER; note = 2'-O-methyl-adenosine-3'-phosphate
  modified_base 4: mod_base = OTHER; note = 2'-O-methyl-uridine-3'-phosphate
  modified_base 5: mod_base = OTHER; note = 2'-deoxy-2'-fluoro-adenosine-3'-phosphate
  modified_base 6: mod_base = OTHER; note = 2'-O-methyl-cytidine-3'-phosphate
  modified_base 7: mod_base = OTHER; note = 2'-deoxy-2'-fluoro-cytidine-3'-phosphate
  modified_base 8: mod_base = OTHER; note = 2'-deoxy-2'-fluoro-uridine-3'-phosphate
  modified_base 9: mod_base = OTHER; note = 2'-deoxy-2'-fluoro-cytidine-3'-phosphate
  modified_base 10: mod_base = OTHER; note = 2'-O-methyl-adenosine-3'-phosphate
  modified_base 11: mod_base = OTHER; note = 2'-O-methyl-cytidine-3'-phosphate
  modified_base 12: mod_base = OTHER; note = 2'-O-methyl-uridine-3'-phosphate
  modified_base 13: mod_base = OTHER; note = 2'-O-methyl-cytidine-3'-phosphate
  modified_base 14: mod_base = OTHER; note = 2'-O-methyl-guanosine-3'-phosphate
  modified_base 15: mod_base = OTHER; note = 2'-O-methyl-cytidine-3'-phosphate
  modified_base 16: mod_base = OTHER; note = 2'-O-methyl-uridine-3'-phosphate
  modified_base 17: mod_base = OTHER; note = 2'-O-methyl-cytidine-3'-phosphate
  modified_base 18: mod_base = OTHER; note = 2'-O-methyl-adenosine-3'-phosphate
  modified_base 19: mod_base = OTHER; note = 2'-O-methyl-adenosine-3'-phosphate
caatacctcactcgctcaa

SEQ ID NO: 1365 - RNA, 19 nt, synthetic construct
  source 1..19: mol_type = other RNA
  modified_base 1: mod_base = OTHER; note = 2'-O-methyl-cytidine-3'-phosphorothioate
  modified_base 2: mod_base = OTHER; note = 2'-O-methyl-adenosine-3'-phosphorothioate
  modified_base 3: mod_base = OTHER; note = 2'-O-methyl-guanosine-3'-phosphate
  modified_base 4: mod_base = OTHER; note = 2'-O-methyl-cytidine-3'-phosphate
  modified_base 5: mod_base = OTHER; note = 2'-deoxy-2'-fluoro-uridine-3'-phosphate
  modified_base 6: mod_base = OTHER; note = 2'-O-methyl-adenosine-3'-phosphate
  modified_base 7: mod_base = OTHER; note = 2'-deoxy-2'-fluoro-uridine-3'-phosphate
  modified_base 8: mod_base = OTHER; note = 2'-deoxy-2'-fluoro-adenosine-3'-phosphate
  modified_base 9: mod_base = OTHER; note = 2'-deoxy-2'-fluoro-adenosine-3'-phosphate
  modified_base 10: mod_base = OTHER; note = 2'-O-methyl-guanosine-3'-phosphate
  modified_base 11: mod_base = OTHER; note = 2'-O-methyl-adenosine-3'-phosphate
  modified_base 12: mod_base = OTHER; note = 2'-O-methyl-adenosine-3'-phosphate
  modified_base 13: mod_base = OTHER; note = 2'-O-methyl-guanosine-3'-phosphate
  modified_base 14: mod_base = OTHER; note = 2'-O-methyl-adenosine-3'-phosphate
  modified_base 15: mod_base = OTHER; note = 2'-O-methyl-guanosine-3'-phosphate
  modified_base 16: mod_base = OTHER; note = 2'-O-methyl-cytidine-3'-phosphate
  modified_base 17: mod_base = OTHER; note = 2'-O-methyl-cytidine-3'-phosphate
  modified_base 18: mod_base = OTHER; note = 2'-O-methyl-uridine-3'-phosphate
  modified_base 19: mod_base = OTHER; note = 2'-O-methyl-adenosine-3'-phosphate
cagctataagaagagccta

SEQ ID NO: 1366 - RNA, 19 nt, synthetic construct
  source 1..19: mol_type = other RNA
  modified_base 1: mod_base = OTHER; note = 2'-O-methyl-adenosine-3'-phosphorothioate
  modified_base 2: mod_base = OTHER; note = 2'-O-methyl-adenosine-3'-phosphorothioate
  modified_base 3: mod_base = OTHER; note = 2'-O-methyl-guanosine-3'-phosphate
  modified_base 4: mod_base = OTHER; note = 2'-O-methyl-adenosine-3'-phosphate
  modified_base 5: mod_base = OTHER; note = 2'-deoxy-2'-fluoro-adenosine-3'-phosphate
  modified_base 6: mod_base = OTHER; note = 2'-O-methyl-guanosine-3'-phosphate
  modified_base 7: mod_base = OTHER; note = 2'-deoxy-2'-fluoro-adenosine-3'-phosphate
  modified_base 8: mod_base = OTHER; note = 2'-deoxy-2'-fluoro-guanosine-3'-phosphate
  modified_base 9: mod_base = OTHER; note = 2'-deoxy-2'-fluoro-cytidine-3'-phosphate
  modified_base 10: mod_base = OTHER; note = 2'-O-methyl-cytidine-3'-phosphate
  modified_base 11: mod_base = OTHER; note = 2'-O-methyl-uridine-3'-phosphate
  modified_base 12: mod_base = OTHER; note = 2'-O-methyl-cytidine-3'-phosphate
  modified_base 13: mod_base = OTHER; note = 2'-O-methyl-adenosine-3'-phosphate
  modified_base 14: mod_base = OTHER; note = 2'-O-methyl-adenosine-3'-phosphate
  modified_base 15: mod_base = OTHER; note = 2'-O-methyl-cytidine-3'-phosphate
  modified_base 16: mod_base = OTHER; note = 2'-O-methyl-cytidine-3'-phosphate
  modified_base 17: mod_base = OTHER; note = 2'-O-methyl-adenosine-3'-phosphate
  modified_base 18: mod_base = OTHER; note = 2'-O-methyl-uridine-3'-phosphate
  modified_base 19: mod_base = OTHER; note = 2'-O-methyl-adenosine-3'-phosphate
aagaagagcctcaaccata

SEQ ID NO: 1367 - RNA, 19 nt, synthetic construct
  source 1..19: mol_type = other RNA
  modified_base 1: mod_base = OTHER; note = 2'-O-methyl-uridine-3'-phosphorothioate
  modified_base 2: mod_base = OTHER; note = 2'-O-methyl-guanosine-3'-phosphorothioate
  modified_base 3: mod_base = OTHER; note = 2'-O-methyl-uridine-3'-phosphate
  modified_base 4: mod_base = OTHER; note = 2'-O-methyl-cytidine-3'-phosphate
  modified_base 5: mod_base = OTHER; note = 2'-deoxy-2'-fluoro-uridine-3'-phosphate
  modified_base 6: mod_base = OTHER; note = 2'-O-methyl-cytidine-3'-phosphate
  modified_base 7: mod_base = OTHER; note = 2'-deoxy-2'-fluoro-adenosine-3'-phosphate
  modified_base 8: mod_base = OTHER; note = 2'-deoxy-2'-fluoro-uridine-3'-phosphate
  modified_base 9: mod_base = OTHER; note = 2'-deoxy-2'-fluoro-cytidine-3'-phosphate
  modified_base 10: mod_base = OTHER; note = 2'-O-methyl-uridine-3'-phosphate
  modified_base 11: mod_base = OTHER; note = 2'-O-methyl-uridine-3'-phosphate
  modified_base 12: mod_base = OTHER; note = 2'-O-methyl-adenosine-3'-phosphate
  modified_base 13: mod_base = OTHER; note = 2'-O-methyl-adenosine-3'-phosphate
  modified_base 14: mod_base = OTHER; note = 2'-O-methyl-uridine-3'-phosphate
  modified_base 15: mod_base = OTHER; note = 2'-O-methyl-adenosine-3'-phosphate
  modified_base 16: mod_base = OTHER; note = 2'-O-methyl-uridine-3'-phosphate
  modified_base 17: mod_base = OTHER; note = 2'-O-methyl-guanosine-3'-phosphate
  modified_base 18: mod_base = OTHER; note = 2'-O-methyl-uridine-3'-phosphate
  modified_base 19: mod_base = OTHER; note = 2'-O-methyl-adenosine-3'-phosphate
tgtctcatcttaatatgta

SEQ ID NO: 1368 - RNA, 19 nt, synthetic construct
  source 1..19: mol_type = other RNA
  modified_base 1: mod_base = OTHER; note = 2'-O-methyl-guanosine-3'-phosphorothioate
  modified_base 2: mod_base = OTHER; note = 2'-O-methyl-uridine-3'-phosphorothioate
  modified_base 3: mod_base = OTHER; note = 2'-O-methyl-cytidine-3'-phosphate
  modified_base 4: mod_base = OTHER; note = 2'-O-methyl-uridine-3'-phosphate
  modified_base 5: mod_base = OTHER; note = 2'-deoxy-2'-fluoro-cytidine-3'-phosphate
  modified_base 6: mod_base = OTHER; note = 2'-O-methyl-adenosine-3'-phosphate
  modified_base 7: mod_base = OTHER; note = 2'-deoxy-2'-fluoro-uridine-3'-phosphate
  modified_base 8: mod_base = OTHER; note = 2'-deoxy-2'-fluoro-cytidine-3'-phosphate
  modified_base 9: mod_base = OTHER; note = 2'-deoxy-2'-fluoro-uridine-3'-phosphate
  modified_base 10: mod_base = OTHER; note = 2'-O-methyl-uridine-3'-phosphate
  modified_base 11: mod_base = OTHER; note = 2'-O-methyl-adenosine-3'-phosphate
  modified_base 12: mod_base = OTHER; note = 2'-O-methyl-adenosine-3'-phosphate
  modified_base 13: mod_base = OTHER; note = 2'-O-methyl-uridine-3'-phosphate
  modified_base 14: mod_base = OTHER; note = 2'-O-methyl-adenosine-3'-phosphate
  modified_base 15: mod_base = OTHER; note = 2'-O-methyl-uridine-3'-phosphate
  modified_base 16: mod_base = OTHER; note = 2'-O-methyl-guanosine-3'-phosphate
  modified_base 17: mod_base = OTHER; note = 2'-O-methyl-uridine-3'-phosphate
  modified_base 18: mod_base = OTHER; note = 2'-O-methyl-cytidine-3'-phosphate
  modified_base 19: mod_base = OTHER; note = 2'-O-methyl-adenosine-3'-phosphate
gtctcatcttaatatgtca

SEQ ID NO: 1369 - RNA, 19 nt, synthetic construct
  source 1..19: mol_type = other RNA
  modified_base 1: mod_base = OTHER; note = 2'-O-methyl-uridine-3'-phosphorothioate
  modified_base 2: mod_base = OTHER; note = 2'-O-methyl-cytidine-3'-phosphorothioate
  modified_base 3: mod_base = OTHER; note = 2'-O-methyl-uridine-3'-phosphate
  modified_base 4: mod_base = OTHER; note = 2'-O-methyl-cytidine-3'-phosphate
  modified_base 5: mod_base = OTHER; note = 2'-deoxy-2'-fluoro-adenosine-3'-phosphate
  modified_base 6: mod_base = OTHER; note = 2'-O-methyl-uridine-3'-phosphate
  modified_base 7: mod_base = OTHER; note = 2'-deoxy-2'-fluoro-cytidine-3'-phosphate
  modified_base 8: mod_base = OTHER; note = 2'-deoxy-2'-fluoro-uridine-3'-phosphate
  modified_base 9: mod_base = OTHER; note = 2'-deoxy-2'-fluoro-uridine-3'-phosphate
  modified_base 10: mod_base = OTHER; note = 2'-O-methyl-adenosine-3'-phosphate
  modified_base 11: mod_base = OTHER; note = 2'-O-methyl-adenosine-3'-phosphate
  modified_base 12: mod_base = OTHER; note = 2'-O-methyl-uridine-3'-phosphate
  modified_base 13: mod_base = OTHER; note = 2'-O-methyl-adenosine-3'-phosphate
  modified_base 14: mod_base = OTHER; note = 2'-O-methyl-uridine-3'-phosphate
  modified_base 15: mod_base = OTHER; note = 2'-O-methyl-guanosine-3'-phosphate
  modified_base 16: mod_base = OTHER; note = 2'-O-methyl-uridine-3'-phosphate
  modified_base 17: mod_base = OTHER; note = 2'-O-methyl-cytidine-3'-phosphate
  modified_base 18: mod_base = OTHER; note = 2'-O-methyl-uridine-3'-phosphate
  modified_base 19: mod_base = OTHER; note = 2'-O-methyl-adenosine-3'-phosphate
tctcatcttaatatgtcta

SEQ ID NO: 1370 - RNA, 19 nt, synthetic construct
  source 1..19: mol_type = other RNA
  modified_base 1: mod_base = OTHER; note = 2'-O-methyl-cytidine-3'-phosphorothioate
  modified_base 2: mod_base = OTHER; note = 2'-O-methyl-uridine-3'-phosphorothioate
  modified_base 3: mod_base = OTHER; note = 2'-O-methyl-cytidine-3'-phosphate
  modified_base 4: mod_base = OTHER; note = 2'-O-methyl-adenosine-3'-phosphate
  modified_base 5: mod_base = OTHER; note = 2'-deoxy-2'-fluoro-uridine-3'-phosphate
  modified_base 6: mod_base = OTHER; note = 2'-O-methyl-cytidine-3'-phosphate
  modified_base 7: mod_base = OTHER; note = 2'-deoxy-2'-fluoro-uridine-3'-phosphate
  modified_base 8: mod_base = OTHER; note = 2'-deoxy-2'-fluoro-uridine-3'-phosphate
  modified_base 9: mod_base = OTHER; note = 2'-deoxy-2'-fluoro-adenosine-3'-phosphate
  modified_base 10: mod_base = OTHER; note = 2'-O-methyl-adenosine-3'-phosphate
  modified_base 11: mod_base = OTHER; note = 2'-O-methyl-uridine-3'-phosphate
  modified_base 12: mod_base = OTHER; note = 2'-O-methyl-adenosine-3'-phosphate
  modified_base 13: mod_base = OTHER; note = 2'-O-methyl-uridine-3'-phosphate
  modified_base 14: mod_base = OTHER; note = 2'-O-methyl-guanosine-3'-phosphate
  modified_base 15: mod_base = OTHER; note = 2'-O-methyl-uridine-3'-phosphate
  modified_base 16: mod_base = OTHER; note = 2'-O-methyl-cytidine-3'-phosphate
  modified_base 17: mod_base = OTHER; note = 2'-O-methyl-uridine-3'-phosphate
  modified_base 18: mod_base = OTHER; note = 2'-O-methyl-cytidine-3'-phosphate
  modified_base 19: mod_base = OTHER; note = 2'-O-methyl-adenosine-3'-phosphate
ctcatcttaatatgtctca

SEQ ID NO: 1371 - RNA, 19 nt, synthetic construct
  source 1..19: mol_type = other RNA
  modified_base 1: mod_base = OTHER; note = 2'-O-methyl-adenosine-3'-phosphorothioate
  modified_base 2: mod_base = OTHER; note = 2'-O-methyl-uridine-3'-phosphorothioate
  modified_base 3: mod_base = OTHER; note = 2'-O-methyl-cytidine-3'-phosphate
  modified_base 4: mod_base = OTHER; note = 2'-O-methyl-uridine-3'-phosphate
  modified_base 5: mod_base = OTHER; note = 2'-deoxy-2'-fluoro-uridine-3'-phosphate
  modified_base 6: mod_base = OTHER; note = 2'-O-methyl-adenosine-3'-phosphate
  modified_base 7: mod_base = OTHER; note = 2'-deoxy-2'-fluoro-adenosine-3'-phosphate
  modified_base 8: mod_base = OTHER; note = 2'-deoxy-2'-fluoro-uridine-3'-phosphate
  modified_base 9: mod_base = OTHER; note = 2'-deoxy-2'-fluoro-adenosine-3'-phosphate
  modified_base 10: mod_base = OTHER; note = 2'-O-methyl-uridine-3'-phosphate
  modified_base 11: mod_base = OTHER; note = 2'-O-methyl-guanosine-3'-phosphate
  modified_base 12: mod_base = OTHER; note = 2'-O-methyl-uridine-3'-phosphate
  modified_base 13: mod_base = OTHER; note = 2'-O-methyl-cytidine-3'-phosphate
  modified_base 14: mod_base = OTHER; note = 2'-O-methyl-uridine-3'-phosphate
  modified_base 15: mod_base = OTHER; note = 2'-O-methyl-cytidine-3'-phosphate
  modified_base 16: mod_base = OTHER; note = 2'-O-methyl-uridine-3'-phosphate
  modified_base 17: mod_base = OTHER; note = 2'-O-methyl-uridine-3'-phosphate
  modified_base 18: mod_base = OTHER; note = 2'-O-methyl-guanosine-3'-phosphate
  modified_base 19: mod_base = OTHER; note = 2'-O-methyl-adenosine-3'-phosphate
atcttaatatgtctcttga

SEQ ID NO: 1372 - RNA, 19 nt, synthetic construct
  source 1..19: mol_type = other RNA
  modified_base 1: mod_base = OTHER; note = 2'-O-methyl-uridine-3'-phosphorothioate
  modified_base 2: mod_base = OTHER; note = 2'-O-methyl-cytidine-3'-phosphorothioate
  modified_base 3: mod_base = OTHER; note = 2'-O-methyl-uridine-3'-phosphate
  modified_base 4: mod_base = OTHER; note = 2'-O-methyl-uridine-3'-phosphate
  modified_base 5: mod_base = OTHER; note = 2'-deoxy-2'-fluoro-adenosine-3'-phosphate
  modified_base 6: mod_base = OTHER; note = 2'-O-methyl-adenosine-3'-phosphate
  modified_base 7: mod_base = OTHER; note = 2'-deoxy-2'-fluoro-uridine-3'-phosphate
  modified_base 8: mod_base = OTHER; note = 2'-deoxy-2'-fluoro-adenosine-3'-phosphate
  modified_base 9: mod_base = OTHER; note = 2'-deoxy-2'-fluoro-uridine-3'-phosphate
  modified_base 10: mod_base = OTHER; note = 2'-O-methyl-guanosine-3'-phosphate
  modified_base 11: mod_base = OTHER; note = 2'-O-methyl-uridine-3'-phosphate
  modified_base 12: mod_base = OTHER; note = 2'-O-methyl-cytidine-3'-phosphate
  modified_base 13: mod_base = OTHER; note = 2'-O-methyl-uridine-3'-phosphate
  modified_base 14: mod_base = OTHER; note = 2'-O-methyl-cytidine-3'-phosphate
  modified_base 15: mod_base = OTHER; note = 2'-O-methyl-uridine-3'-phosphate
  modified_base 16: mod_base = OTHER; note = 2'-O-methyl-uridine-3'-phosphate
  modified_base 17: mod_base = OTHER; note = 2'-O-methyl-guanosine-3'-phosphate
  modified_base 18: mod_base = OTHER; note = 2'-O-methyl-cytidine-3'-phosphate
  modified_base 19: mod_base = OTHER; note = 2'-O-methyl-adenosine-3'-phosphate
tcttaatatgtctcttgca

SEQ ID NO: 1373 - RNA, 19 nt, synthetic construct
  source 1..19: mol_type = other RNA
  modified_base 1: mod_base = OTHER; note = 2'-O-methyl-cytidine-3'-phosphorothioate
  modified_base 2: mod_base = OTHER; note = 2'-O-methyl-uridine-3'-phosphorothioate
  modified_base 3: mod_base = OTHER; note = 2'-O-methyl-uridine-3'-phosphate
  modified_base 4: mod_base = OTHER; note = 2'-O-methyl-adenosine-3'-phosphate
  modified_base 5: mod_base = OTHER; note = 2'-deoxy-2'-fluoro-adenosine-3'-phosphate
  modified_base 6: mod_base = OTHER; note = 2'-O-methyl-uridine-3'-phosphate
  modified_base 7: mod_base = OTHER; note = 2'-deoxy-2'-fluoro-adenosine-3'-phosphate
  modified_base 8: mod_base = OTHER; note = 2'-deoxy-2'-fluoro-uridine-3'-phosphate
  modified_base 9: mod_base = OTHER; note = 2'-deoxy-2'-fluoro-guanosine-3'-phosphate
  modified_base 10: mod_base = OTHER; note = 2'-O-methyl-uridine-3'-phosphate
  modified_base 11: mod_base = OTHER; note = 2'-O-methyl-cytidine-3'-phosphate
  modified_base 12: mod_base = OTHER; note = 2'-O-methyl-uridine-3'-phosphate
  modified_base 13: mod_base = OTHER; note = 2'-O-methyl-cytidine-3'-phosphate
  modified_base 14: mod_base = OTHER; note = 2'-O-methyl-uridine-3'-phosphate
  modified_base 15: mod_base = OTHER; note = 2'-O-methyl-uridine-3'-phosphate
  modified_base 16: mod_base = OTHER; note = 2'-O-methyl-guanosine-3'-phosphate
  modified_base 17: mod_base = OTHER; note = 2'-O-methyl-cytidine-3'-phosphate
  modified_base 18: mod_base = OTHER; note = 2'-O-methyl-uridine-3'-phosphate
  modified_base 19: mod_base = OTHER; note = 2'-O-methyl-adenosine-3'-phosphate
cttaatatgtctcttgcta

SEQ ID NO: 1374 - RNA, 19 nt, synthetic construct
  source 1..19: mol_type = other RNA
  modified_base 1: mod_base = OTHER; note = 2'-O-methyl-uridine-3'-phosphorothioate
  modified_base 2: mod_base = OTHER; note = 2'-O-methyl-uridine-3'-phosphorothioate
  modified_base 3: mod_base = OTHER; note = 2'-O-methyl-adenosine-3'-phosphate
  modified_base 4: mod_base = OTHER; note = 2'-O-methyl-adenosine-3'-phosphate
  modified_base 5: mod_base = OTHER; note = 2'-deoxy-2'-fluoro-uridine-3'-phosphate
  modified_base 6: mod_base = OTHER; note = 2'-O-methyl-adenosine-3'-phosphate
  modified_base 7: mod_base = OTHER; note = 2'-deoxy-2'-fluoro-uridine-3'-phosphate
  modified_base 8: mod_base = OTHER; note = 2'-deoxy-2'-fluoro-guanosine-3'-phosphate
  modified_base 9: mod_base = OTHER; note = 2'-deoxy-2'-fluoro-uridine-3'-phosphate
  modified_base 10: mod_base = OTHER; note = 2'-O-methyl-cytidine-3'-phosphate
  modified_base 11: mod_base = OTHER; note = 2'-O-methyl-uridine-3'-phosphate
  modified_base 12: mod_base = OTHER; note = 2'-O-methyl-cytidine-3'-phosphate
  modified_base 13: mod_base = OTHER; note = 2'-O-methyl-uridine-3'-phosphate
  modified_base 14: mod_base = OTHER; note = 2'-O-methyl-uridine-3'-phosphate
  modified_base 15: mod_base = OTHER; note = 2'-O-methyl-guanosine-3'-phosphate
  modified_base 16: mod_base = OTHER; note = 2'-O-methyl-cytidine-3'-phosphate
  modified_base 17: mod_base = OTHER; note = 2'-O-methyl-uridine-3'-phosphate
  modified_base 18: mod_base = OTHER; note = 2'-O-methyl-guanosine-3'-phosphate
  modified_base 19: mod_base = OTHER; note = 2'-O-methyl-adenosine-3'-phosphate
ttaatatgtctcttgctga

SEQ ID NO: 1375 - RNA, 19 nt, synthetic construct
  source 1..19: mol_type = other RNA
  modified_base 1: mod_base = OTHER; note = 2'-O-methyl-uridine-3'-phosphorothioate
  modified_base 2: mod_base = OTHER; note = 2'-O-methyl-adenosine-3'-phosphorothioate
  modified_base 3: mod_base = OTHER; note = 2'-O-methyl-adenosine-3'-phosphate
  modified_base 4: mod_base = OTHER; note = 2'-O-methyl-uridine-3'-phosphate
  modified_base 5: mod_base = OTHER; note = 2'-deoxy-2'-fluoro-adenosine-3'-phosphate
  modified_base 6: mod_base = OTHER; note = 2'-O-methyl-uridine-3'-phosphate
  modified_base 7: mod_base = OTHER; note = 2'-deoxy-2'-fluoro-guanosine-3'-phosphate
  modified_base 8: mod_base = OTHER; note = 2'-deoxy-2'-fluoro-uridine-3'-phosphate
  modified_base 9: mod_base = OTHER; note = 2'-deoxy-2'-fluoro-cytidine-3'-phosphate
  modified_base 10: mod_base = OTHER; note = 2'-O-methyl-uridine-3'-phosphate
  modified_base 11: mod_base = OTHER; note = 2'-O-methyl-cytidine-3'-phosphate
  modified_base 12: mod_base = OTHER; note = 2'-O-methyl-uridine-3'-phosphate
  modified_base 13: mod_base = OTHER; note = 2'-O-methyl-uridine-3'-phosphate
  modified_base 14: mod_base = OTHER; note = 2'-O-methyl-guanosine-3'-phosphate
  modified_base 15: mod_base = OTHER; note = 2'-O-methyl-cytidine-3'-phosphate
  modified_base 16: mod_base = OTHER; note = 2'-O-methyl-uridine-3'-phosphate
  modified_base 17: mod_base = OTHER; note = 2'-O-methyl-guanosine-3'-phosphate
  modified_base 18: mod_base = OTHER; note = 2'-O-methyl-adenosine-3'-phosphate
  modified_base 19: mod_base = OTHER; note = 2'-O-methyl-adenosine-3'-phosphate
taatatgtctcttgctgaa

SEQ ID NO: 1376 - RNA, 19 nt, synthetic construct
  source 1..19: mol_type = other RNA
  modified_base 1: mod_base = OTHER; note = 2'-O-methyl-adenosine-3'-phosphorothioate
  modified_base 2: mod_base = OTHER; note = 2'-O-methyl-adenosine-3'-phosphorothioate
  modified_base 3: mod_base = OTHER; note = 2'-O-methyl-uridine-3'-phosphate
  modified_base 4: mod_base = OTHER; note = 2'-O-methyl-adenosine-3'-phosphate
  modified_base 5: mod_base = OTHER; note = 2'-deoxy-2'-fluoro-uridine-3'-phosphate
  modified_base 6: mod_base = OTHER; note = 2'-O-methyl-guanosine-3'-phosphate
  modified_base 7: mod_base = OTHER; note = 2'-deoxy-2'-fluoro-uridine-3'-phosphate
  modified_base 8: mod_base = OTHER; note = 2'-deoxy-2'-fluoro-cytidine-3'-phosphate
  modified_base 9: mod_base = OTHER; note = 2'-deoxy-2'-fluoro-uridine-3'-phosphate
  modified_base 10: mod_base = OTHER; note = 2'-O-methyl-cytidine-3'-phosphate
  modified_base 11: mod_base = OTHER; note = 2'-O-methyl-uridine-3'-phosphate
  modified_base 12: mod_base = OTHER; note = 2'-O-methyl-uridine-3'-phosphate
  modified_base 13: mod_base = OTHER; note = 2'-O-methyl-guanosine-3'-phosphate
  modified_base 14: mod_base = OTHER; note = 2'-O-methyl-cytidine-3'-phosphate
  modified_base 15: mod_base = OTHER; note = 2'-O-methyl-uridine-3'-phosphate
  modified_base 16: mod_base = OTHER; note = 2'-O-methyl-guanosine-3'-phosphate
  modified_base 17: mod_base = OTHER; note = 2'-O-methyl-adenosine-3'-phosphate
  modified_base 18: mod_base = OTHER; note = 2'-O-methyl-uridine-3'-phosphate
  modified_base 19: mod_base = OTHER; note = 2'-O-methyl-adenosine-3'-phosphate
aatatgtctcttgctgata

SEQ ID NO: 1377 - RNA, 19 nt, synthetic construct
  source 1..19: mol_type = other RNA
  modified_base 1: mod_base = OTHER; note = 2'-O-methyl-adenosine-3'-phosphorothioate
  modified_base 2: mod_base = OTHER; note = 2'-O-methyl-uridine-3'-phosphorothioate
  modified_base 3: mod_base = OTHER; note = 2'-O-methyl-adenosine-3'-phosphate
  modified_base 4: mod_base = OTHER; note = 2'-O-methyl-uridine-3'-phosphate
  modified_base 5: mod_base = OTHER; note = 2'-deoxy-2'-fluoro-guanosine-3'-phosphate
  modified_base 6: mod_base = OTHER; note = 2'-O-methyl-uridine-3'-phosphate
  modified_base 7: mod_base = OTHER; note = 2'-deoxy-2'-fluoro-cytidine-3'-phosphate
  modified_base 8: mod_base = OTHER; note = 2'-deoxy-2'-fluoro-uridine-3'-phosphate
  modified_base 9: mod_base = OTHER; note = 2'-deoxy-2'-fluoro-cytidine-3'-phosphate
  modified_base 10: mod_base = OTHER; note = 2'-O-methyl-uridine-3'-phosphate
  modified_base 11: mod_base = OTHER; note = 2'-O-methyl-uridine-3'-phosphate
  modified_base 12: mod_base = OTHER; note = 2'-O-methyl-guanosine-3'-phosphate
  modified_base 13: mod_base = OTHER; note = 2'-O-methyl-cytidine-3'-phosphate
  modified_base 14: mod_base = OTHER; note = 2'-O-methyl-uridine-3'-phosphate
  modified_base 15: mod_base = OTHER; note = 2'-O-methyl-guanosine-3'-phosphate
  modified_base 16: mod_base = OTHER; note = 2'-O-methyl-adenosine-3'-phosphate
  modified_base 17: mod_base = OTHER; note = 2'-O-methyl-uridine-3'-phosphate
  modified_base 18: mod_base = OTHER; note = 2'-O-methyl-cytidine-3'-phosphate
  modified_base 19: mod_base = OTHER; note = 2'-O-methyl-adenosine-3'-phosphate
atatgtctcttgctgatca

SEQ ID NO: 1378 - RNA, 19 nt, synthetic construct
  source 1..19: mol_type = other RNA
  modified_base 1: mod_base = OTHER; note = 2'-O-methyl-adenosine-3'-phosphorothioate
  modified_base 2: mod_base = OTHER; note = 2'-O-methyl-uridine-3'-phosphorothioate
  modified_base 3: mod_base = OTHER; note = 2'-O-methyl-guanosine-3'-phosphate
  modified_base 4: mod_base = OTHER; note = 2'-O-methyl-uridine-3'-phosphate
  modified_base 5: mod_base = OTHER; note = 2'-deoxy-2'-fluoro-cytidine-3'-phosphate
  modified_base 6: mod_base = OTHER; note = 2'-O-methyl-uridine-3'-phosphate
  modified_base 7: mod_base = OTHER; note = 2'-deoxy-2'-fluoro-cytidine-3'-phosphate
  modified_base 8: mod_base = OTHER; note = 2'-deoxy-2'-fluoro-uridine-3'-phosphate
  modified_base 9: mod_base = OTHER; note = 2'-deoxy-2'-fluoro-uridine-3'-phosphate
  modified_base 10: mod_base = OTHER; note = 2'-O-methyl-guanosine-3'-phosphate
  modified_base 11: mod_base = OTHER; note = 2'-O-methyl-cytidine-3'-phosphate
  modified_base 12: mod_base = OTHER; note = 2'-O-methyl-uridine-3'-phosphate
  modified_base 13: mod_base = OTHER; note = 2'-O-methyl-guanosine-3'-phosphate
  modified_base 14: mod_base = OTHER; note = 2'-O-methyl-adenosine-3'-phosphate
  modified_base 15: mod_base = OTHER; note = 2'-O-methyl-uridine-3'-phosphate
  modified_base 16: mod_base = OTHER; note = 2'-O-methyl-cytidine-3'-phosphate
  modified_base 17: mod_base = OTHER; note = 2'-O-methyl-uridine-3'-phosphate
  modified_base 18: mod_base = OTHER; note = 2'-O-methyl-guanosine-3'-phosphate
  modified_base 19: mod_base = OTHER; note = 2'-O-methyl-adenosine-3'-phosphate
atgtctcttgctgatctga

SEQ ID NO: 1379 - RNA, 19 nt, synthetic construct
  source 1..19: mol_type = other RNA
  modified_base 1: mod_base = OTHER; note = 2'-O-methyl-uridine-3'-phosphorothioate
  modified_base 2: mod_base = OTHER; note = 2'-O-methyl-guanosine-3'-phosphorothioate
  modified_base 3: mod_base = OTHER; note = 2'-O-methyl-uridine-3'-phosphate
  modified_base 4: mod_base = OTHER; note = 2'-O-methyl-cytidine-3'-phosphate
  modified_base 5: mod_base = OTHER; note = 2'-deoxy-2'-fluoro-uridine-3'-phosphate
  modified_base 6: mod_base = OTHER; note = 2'-O-methyl-cytidine-3'-phosphate
  modified_base 7: mod_base = OTHER; note = 2'-deoxy-2'-fluoro-uridine-3'-phosphate
  modified_base 8: mod_base = OTHER; note = 2'-deoxy-2'-fluoro-uridine-3'-phosphate
  modified_base 9: mod_base = OTHER; note = 2'-deoxy-2'-fluoro-guanosine-3'-phosphate
  modified_base 10: mod_base = OTHER; note = 2'-O-methyl-cytidine-3'-phosphate
  modified_base 11: mod_base = OTHER; note = 2'-O-methyl-uridine-3'-phosphate
  modified_base 12: mod_base = OTHER; note = 2'-O-methyl-guanosine-3'-phosphate
  modified_base 13: mod_base = OTHER; note = 2'-O-methyl-adenosine-3'-phosphate
  modified_base 14: mod_base = OTHER; note = 2'-O-methyl-uridine-3'-phosphate
  modified_base 15: mod_base = OTHER; note = 2'-O-methyl-cytidine-3'-phosphate
  modified_base 16: mod_base = OTHER; note = 2'-O-methyl-uridine-3'-phosphate
  modified_base 17: mod_base = OTHER; note = 2'-O-methyl-guanosine-3'-phosphate
  modified_base 18: mod_base = OTHER; note = 2'-O-methyl-uridine-3'-phosphate
  modified_base 19: mod_base = OTHER; note = 2'-O-methyl-adenosine-3'-phosphate
tgtctcttgctgatctgta

SEQ ID NO: 1380 - RNA, 19 nt, synthetic construct
  source 1..19: mol_type = other RNA
  modified_base 1: mod_base = OTHER; note = 2'-O-methyl-uridine-3'-phosphorothioate
  modified_base 2: mod_base = OTHER; note = 2'-O-methyl-uridine-3'-phosphorothioate
  modified_base 3: mod_base = OTHER; note = 2'-O-methyl-guanosine-3'-phosphate
  modified_base 4: mod_base = OTHER; note = 2'-O-methyl-cytidine-3'-phosphate
  modified_base 5: mod_base = OTHER; note = 2'-deoxy-2'-fluoro-uridine-3'-phosphate
  modified_base 6: mod_base = OTHER; note = 2'-O-methyl-guanosine-3'-phosphate
  modified_base 7: mod_base = OTHER; note = 2'-deoxy-2'-fluoro-adenosine-3'-phosphate
  modified_base 8: mod_base = OTHER; note = 2'-deoxy-2'-fluoro-uridine-3'-phosphate
  modified_base 9: mod_base = OTHER; note = 2'-deoxy-2'-fluoro-cytidine-3'-phosphate
  modified_base 10: mod_base = OTHER; note = 2'-O-methyl-uridine-3'-phosphate
  modified_base 11: mod_base = OTHER; note = 2'-O-methyl-guanosine-3'-phosphate
  modified_base 12: mod_base = OTHER; note = 2'-O-methyl-uridine-3'-phosphate
  modified_base 13: mod_base = OTHER; note = 2'-O-methyl-adenosine-3'-phosphate
  modified_base 14: mod_base = OTHER; note = 2'-O-methyl-uridine-3'-phosphate
  modified_base 15: mod_base = OTHER; note = 2'-O-methyl-cytidine-3'-phosphate
  modified_base 16: mod_base = OTHER; note = 2'-O-methyl-adenosine-3'-phosphate
  modified_base 17: mod_base = OTHER; note = 2'-O-methyl-uridine-3'-phosphate
  modified_base 18: mod_base = OTHER; note = 2'-O-methyl-cytidine-3'-phosphate
  modified_base 19: mod_base = OTHER; note = 2'-O-methyl-adenosine-3'-phosphate
ttgctgatctgtatcatca

SEQ ID NO: 1381 - RNA, 19 nt, synthetic construct
  source 1..19: mol_type = other RNA
  modified_base 1: mod_base = OTHER; note = 2'-O-methyl-uridine-3'-phosphorothioate
  modified_base 2: mod_base = OTHER; note = 2'-O-methyl-guanosine-3'-phosphorothioate
  modified_base 3: mod_base = OTHER; note = 2'-O-methyl-cytidine-3'-phosphate
  modified_base 4: mod_base = OTHER; note = 2'-O-methyl-uridine-3'-phosphate
  modified_base 5: mod_base = OTHER; note = 2'-deoxy-2'-fluoro-guanosine-3'-phosphate
  modified_base 6: mod_base = OTHER; note = 2'-O-methyl-adenosine-3'-phosphate
  modified_base 7: mod_base = OTHER; note = 2'-deoxy-2'-fluoro-uridine-3'-phosphate
  modified_base 8: mod_base = OTHER; note = 2'-deoxy-2'-fluoro-cytidine-3'-phosphate
  modified_base 9: mod_base = OTHER; note = 2'-deoxy-2'-fluoro-uridine-3'-phosphate
  modified_base 10: mod_base = OTHER; note = 2'-O-methyl-guanosine-3'-phosphate
  modified_base 11: mod_base = OTHER; note = 2'-O-methyl-uridine-3'-phosphate
  modified_base 12: mod_base = OTHER; note = 2'-O-methyl-adenosine-3'-phosphate
  modified_base 13: mod_base = OTHER; note = 2'-O-methyl-uridine-3'-phosphate
  modified_base 14: mod_base = OTHER; note = 2'-O-methyl-cytidine-3'-phosphate
  modified_base 15: mod_base = OTHER; note = 2'-O-methyl-adenosine-3'-phosphate
  modified_base 16: mod_base = OTHER; note = 2'-O-methyl-uridine-3'-phosphate
  modified_base 17: mod_base = OTHER; note = 2'-O-methyl-cytidine-3'-phosphate
  modified_base 18: mod_base = OTHER; note = 2'-O-methyl-guanosine-3'-phosphate
  modified_base 19: mod_base = OTHER; note = 2'-O-methyl-adenosine-3'-phosphate
tgctgatctgtatcatcga

SEQ ID NO: 1382 - RNA, 19 nt, synthetic construct
  source 1..19: mol_type = other RNA
  modified_base 1: mod_base = OTHER; note = 2'-O-methyl-guanosine-3'-phosphorothioate
  modified_base 2: mod_base = OTHER; note = 2'-O-methyl-cytidine-3'-phosphorothioate
  modified_base 3: mod_base = OTHER; note = 2'-O-methyl-uridine-3'-phosphate
  modified_base 4: mod_base = OTHER; note = 2'-O-methyl-guanosine-3'-phosphate
  modified_base 5: mod_base = OTHER; note = 2'-deoxy-2'-fluoro-adenosine-3'-phosphate
  modified_base 6: mod_base = OTHER; note = 2'-O-methyl-uridine-3'-phosphate
  modified_base 7: mod_base = OTHER; note = 2'-deoxy-2'-fluoro-cytidine-3'-phosphate
  modified_base 8: mod_base = OTHER; note = 2'-deoxy-2'-fluoro-uridine-3'-phosphate
  modified_base 9: mod_base = OTHER; note = 2'-deoxy-2'-fluoro-guanosine-3'-phosphate
  modified_base 10: mod_base = OTHER; note = 2'-O-methyl-uridine-3'-phosphate
  modified_base 11: mod_base = OTHER; note = 2'-O-methyl-adenosine-3'-phosphate
  modified_base 12: mod_base = OTHER; note = 2'-O-methyl-uridine-3'-phosphate
  modified_base 13: mod_base = OTHER; note = 2'-O-methyl-cytidine-3'-phosphate
  modified_base 14: mod_base = OTHER; note = 2'-O-methyl-adenosine-3'-phosphate
  modified_base 15: mod_base = OTHER; note = 2'-O-methyl-uridine-3'-phosphate
  modified_base 16: mod_base = OTHER; note = 2'-O-methyl-cytidine-3'-phosphate
  modified_base 17: mod_base = OTHER; note = 2'-O-methyl-guanosine-3'-phosphate
  modified_base 18: mod_base = OTHER; note = 2'-O-methyl-uridine-3'-phosphate
  modified_base 19: mod_base = OTHER; note = 2'-O-methyl-adenosine-3'-phosphate
gctgatctgtatcatcgta

SEQ ID NO: 1383 - RNA, 19 nt, synthetic construct
  source 1..19: mol_type = other RNA
  modified_base 1: mod_base = OTHER; note = 2'-O-methyl-cytidine-3'-phosphorothioate
  modified_base 2: mod_base = OTHER; note = 2'-O-methyl-uridine-3'-phosphorothioate
  modified_base 3: mod_base = OTHER; note = 2'-O-methyl-guanosine-3'-phosphate
  modified_base 4: mod_base = OTHER; note = 2'-O-methyl-adenosine-3'-phosphate
  modified_base 5: mod_base = OTHER; note = 2'-deoxy-2'-fluoro-uridine-3'-phosphate
  modified_base 6: mod_base = OTHER; note = 2'-O-methyl-cytidine-3'-phosphate
  modified_base 7: mod_base = OTHER; note = 2'-deoxy-2'-fluoro-uridine-3'-phosphate
  modified_base 8: mod_base = OTHER; note = 2'-deoxy-2'-fluoro-guanosine-3'-phosphate
  modified_base 9: mod_base = OTHER; note = 2'-deoxy-2'-fluoro-uridine-3'-phosphate
  modified_base 10: mod_base = OTHER; note = 2'-O-methyl-adenosine-3'-phosphate
  modified_base 11: mod_base = OTHER; note = 2'-O-methyl-uridine-3'-phosphate
  modified_base 12: mod_base = OTHER; note = 2'-O-methyl-cytidine-3'-phosphate
  modified_base 13: mod_base = OTHER; note = 2'-O-methyl-adenosine-3'-phosphate
  modified_base 14: mod_base = OTHER; note = 2'-O-methyl-uridine-3'-phosphate
  modified_base 15: mod_base = OTHER; note = 2'-O-methyl-cytidine-3'-phosphate
  modified_base 16: mod_base = OTHER; note = 2'-O-methyl-guanosine-3'-phosphate
  modified_base 17: mod_base = OTHER; note = 2'-O-methyl-uridine-3'-phosphate
  modified_base 18: mod_base = OTHER; note = 2'-O-methyl-guanosine-3'-phosphate
  modified_base 19: mod_base = OTHER; note = 2'-O-methyl-adenosine-3'-phosphate
ctgatctgtatcatcgtga

SEQ ID NO: 1384 - RNA, 19 nt, synthetic construct
  source 1..19: mol_type = other RNA
  modified_base 1: mod_base = OTHER; note = 2'-O-methyl-uridine-3'-phosphorothioate
  modified_base 2: mod_base = OTHER; note = 2'-O-methyl-guanosine-3'-phosphorothioate
  modified_base 3: mod_base = OTHER; note = 2'-O-methyl-adenosine-3'-phosphate
  modified_base 4: mod_base = OTHER; note = 2'-O-methyl-uridine-3'-phosphate
  modified_base 5: mod_base = OTHER; note = 2'-deoxy-2'-fluoro-cytidine-3'-phosphate
  modified_base 6: mod_base = OTHER; note = 2'-O-methyl-uridine-3'-phosphate
  modified_base 7: mod_base = OTHER; note = 2'-deoxy-2'-fluoro-guanosine-3'-phosphate
  modified_base 8: mod_base = OTHER; note = 2'-deoxy-2'-fluoro-uridine-3'-phosphate
  modified_base 9: mod_base = OTHER; note = 2'-deoxy-2'-fluoro-adenosine-3'-phosphate
  modified_base 10: mod_base = OTHER; note = 2'-O-methyl-uridine-3'-phosphate
  modified_base 11: mod_base = OTHER; note = 2'-O-methyl-cytidine-3'-phosphate
  modified_base 12: mod_base = OTHER; note = 2'-O-methyl-adenosine-3'-phosphate
  modified_base 13: mod_base = OTHER; note = 2'-O-methyl-uridine-3'-phosphate
  modified_base 14: mod_base = OTHER; note = 2'-O-methyl-cytidine-3'-phosphate
  modified_base 15: mod_base = OTHER; note = 2'-O-methyl-guanosine-3'-phosphate
  modified_base 16: mod_base = OTHER; note = 2'-O-methyl-uridine-3'-phosphate
  modified_base 17: mod_base = OTHER; note = 2'-O-methyl-guanosine-3'-phosphate
  modified_base 18: mod_base = OTHER; note = 2'-O-methyl-adenosine-3'-phosphate
  modified_base 19: mod_base = OTHER; note = 2'-O-methyl-adenosine-3'-phosphate
tgatctgtatcatcgtgaa

SEQ ID NO: 1385 - RNA, 19 nt, synthetic construct
  source 1..19: mol_type = other RNA
  modified_base 1: mod_base = OTHER; note = 2'-O-methyl-guanosine-3'-phosphorothioate
  modified_base 2: mod_base = OTHER; note = 2'-O-methyl-adenosine-3'-phosphorothioate
  modified_base 3: mod_base = OTHER; note = 2'-O-methyl-uridine-3'-phosphate
  modified_base 4: mod_base = OTHER; note = 2'-O-methyl-cytidine-3'-phosphate
  modified_base 5: mod_base = OTHER; note = 2'-deoxy-2'-fluoro-uridine-3'-phosphate
  modified_base 6: mod_base = OTHER; note = 2'-O-methyl-guanosine-3'-phosphate
  modified_base 7: mod_base = OTHER; note = 2'-deoxy-2'-fluoro-uridine-3'-phosphate
  modified_base 8: mod_base = OTHER; note = 2'-deoxy-2'-fluoro-adenosine-3'-phosphate
  modified_base 9: mod_base = OTHER; note = 2'-deoxy-2'-fluoro-uridine-3'-phosphate
  modified_base 10: mod_base = OTHER; note = 2'-O-methyl-cytidine-3'-phosphate
  modified_base 11: mod_base = OTHER; note = 2'-O-methyl-adenosine-3'-phosphate
  modified_base 12: mod_base = OTHER; note = 2'-O-methyl-uridine-3'-phosphate
  modified_base 13: mod_base = OTHER; note = 2'-O-methyl-cytidine-3'-phosphate
  modified_base 14: mod_base = OTHER; note = 2'-O-methyl-guanosine-3'-phosphate
  modified_base 15: mod_base = OTHER; note = 2'-O-methyl-uridine-3'-phosphate
  modified_base 16: mod_base = OTHER; note = 2'-O-methyl-guanosine-3'-phosphate
  modified_base 17: mod_base = OTHER; note = 2'-O-methyl-adenosine-3'-phosphate
  modified_base 18: mod_base = OTHER; note = 2'-O-methyl-uridine-3'-phosphate
  modified_base 19: mod_base = OTHER; note = 2'-O-methyl-adenosine-3'-phosphate
gatctgtatcatcgtgata

SEQ ID NO: 1386 - RNA, 19 nt, synthetic construct
  source 1..19: mol_type = other RNA
  modified_base 1: mod_base = OTHER; note = 2'-O-methyl-adenosine-3'-phosphorothioate
  modified_base 2: mod_base = OTHER; note = 2'-O-methyl-uridine-3'-phosphorothioate
  modified_base 3: mod_base = OTHER; note = 2'-O-methyl-cytidine-3'-phosphate
  modified_base 4: mod_base = OTHER; note = 2'-O-methyl-uridine-3'-phosphate
  modified_base 5: mod_base = OTHER; note = 2'-deoxy-2'-fluoro-guanosine-3'-phosphate
  modified_base 6: mod_base = OTHER; note = 2'-O-methyl-uridine-3'-phosphate
  modified_base 7: mod_base = OTHER; note = 2'-deoxy-2'-fluoro-adenosine-3'-phosphate
  modified_base 8: mod_base = OTHER; note = 2'-deoxy-2'-fluoro-uridine-3'-phosphate
  modified_base 9: mod_base = OTHER; note = 2'-deoxy-2'-fluoro-cytidine-3'-phosphate
  modified_base 10: mod_base = OTHER; note = 2'-O-methyl-adenosine-3'-phosphate
  modified_base 11: mod_base = OTHER; note = 2'-O-methyl-uridine-3'-phosphate
  modified_base 12: mod_base = OTHER; note = 2'-O-methyl-cytidine-3'-phosphate
  modified_base 13: mod_base = OTHER; note = 2'-O-methyl-guanosine-3'-phosphate
  modified_base 14: mod_base = OTHER; note = 2'-O-methyl-uridine-3'-phosphate
  modified_base 15: mod_base = OTHER; note = 2'-O-methyl-guanosine-3'-phosphate
  modified_base 16: mod_base = OTHER; note = 2'-O-methyl-adenosine-3'-phosphate
  modified_base 17: mod_base = OTHER; note = 2'-O-methyl-uridine-3'-phosphate
  modified_base 18: mod_base = OTHER; note = 2'-O-methyl-guanosine-3'-phosphate
  modified_base 19: mod_base = OTHER; note = 2'-O-methyl-adenosine-3'-phosphate
atctgtatcatcgtgatga

SEQ ID NO: 1387 - RNA, 19 nt, synthetic construct
  source 1..19: mol_type = other RNA
  modified_base 1: mod_base = OTHER; note = 2'-O-methyl-uridine-3'-phosphorothioate
  modified_base 2: mod_base = OTHER; note = 2'-O-methyl-cytidine-3'-phosphorothioate
  modified_base 3: mod_base = OTHER; note = 2'-O-methyl-uridine-3'-phosphate
  modified_base 4: mod_base = OTHER; note = 2'-O-methyl-guanosine-3'-phosphate
  modified_base 5: mod_base = OTHER; note = 2'-deoxy-2'-fluoro-uridine-3'-phosphate
  modified_base 6: mod_base = OTHER; note = 2'-O-methyl-adenosine-3'-phosphate
  modified_base 7: mod_base = OTHER; note = 2'-deoxy-2'-fluoro-uridine-3'-phosphate
  modified_base 8: mod_base = OTHER; note = 2'-deoxy-2'-fluoro-cytidine-3'-phosphate
  modified_base 9: mod_base = OTHER; note = 2'-deoxy-2'-fluoro-adenosine-3'-phosphate
  modified_base 10: mod_base = OTHER; note = 2'-O-methyl-uridine-3'-phosphate
  modified_base 11: mod_base = OTHER; note = 2'-O-methyl-cytidine-3'-phosphate
  modified_base 12: mod_base = OTHER; note = 2'-O-methyl-guanosine-3'-phosphate
  modified_base 13: mod_base = OTHER; note = 2'-O-methyl-uridine-3'-phosphate
  modified_base 14: mod_base = OTHER; note = 2'-O-methyl-guanosine-3'-phosphate
  modified_base 15: mod_base = OTHER; note = 2'-O-methyl-adenosine-3'-phosphate
  modified_base 16: mod_base = OTHER; note = 2'-O-methyl-uridine-3'-phosphate
  modified_base 17: mod_base = OTHER; note = 2'-O-methyl-guanosine-3'-phosphate
  modified_base 18: mod_base = OTHER; note = 2'-O-methyl-cytidine-3'-phosphate
  modified_base 19: mod_base = OTHER; note = 2'-O-methyl-adenosine-3'-phosphate
tctgtatcatcgtgatgca

SEQ ID NO: 1388 - RNA, 19 nt, synthetic construct
  source 1..19: mol_type = other RNA
  modified_base 1: mod_base = OTHER; note = 2'-O-methyl-guanosine-3'-phosphorothioate
  modified_base 2: mod_base = OTHER; note = 2'-O-methyl-uridine-3'-phosphorothioate
  modified_base 3: mod_base = OTHER; note = 2'-O-methyl-adenosine-3'-phosphate
  modified_base 4: mod_base = OTHER; note = 2'-O-methyl-uridine-3'-phosphate
  modified_base 5: mod_base = OTHER; note = 2'-deoxy-2'-fluoro-cytidine-3'-phosphate
  modified_base 6: mod_base = OTHER; note = 2'-O-methyl-adenosine-3'-phosphate
  modified_base 7: mod_base = OTHER; note = 2'-deoxy-2'-fluoro-uridine-3'-phosphate
  modified_base 8: mod_base = OTHER; note = 2'-deoxy-2'-fluoro-cytidine-3'-phosphate
  modified_base 9: mod_base = OTHER; note = 2'-deoxy-2'-fluoro-guanosine-3'-phosphate
  modified_base 10: mod_base = OTHER; note = 2'-O-methyl-uridine-3'-phosphate
  modified_base 11: mod_base = OTHER; note = 2'-O-methyl-guanosine-3'-phosphate
  modified_base 12: mod_base = OTHER; note = 2'-O-methyl-adenosine-3'-phosphate
  modified_base 13: mod_base = OTHER; note = 2'-O-methyl-uridine-3'-phosphate
  modified_base 14: mod_base = OTHER; note = 2'-O-methyl-guanosine-3'-phosphate
  modified_base 15: mod_base = OTHER; note = 2'-O-methyl-cytidine-3'-phosphate
  modified_base 16: mod_base = OTHER; note = 2'-O-methyl-uridine-3'-phosphate
  modified_base 17: mod_base = OTHER; note = 2'-O-methyl-uridine-3'-phosphate
  modified_base 18: mod_base = OTHER; note = 2'-O-methyl-cytidine-3'-phosphate
  modified_base 19: mod_base = OTHER; note = 2'-O-methyl-adenosine-3'-phosphate
gtatcatcgtgatgcttca

SEQ ID NO: 1389 - RNA, 19 nt, synthetic construct
  source 1..19: mol_type = other RNA
  modified_base 1: mod_base = OTHER; note = 2'-O-methyl-uridine-3'-phosphorothioate
  modified_base 2: mod_base = OTHER; note = 2'-O-methyl-cytidine-3'-phosphorothioate
  modified_base 3: mod_base = OTHER; note = 2'-O-methyl-adenosine-3'-phosphate
  modified_base 4: mod_base = OTHER; note = 2'-O-methyl-uridine-3'-phosphate
  modified_base 5: mod_base = OTHER; note = 2'-deoxy-2'-fluoro-cytidine-3'-phosphate
  modified_base 6: mod_base = OTHER; note = 2'-O-methyl-guanosine-3'-phosphate
  modified_base 7: mod_base = OTHER; note = 2'-deoxy-2'-fluoro-uridine-3'-phosphate
  modified_base 8: mod_base = OTHER; note = 2'-deoxy-2'-fluoro-guanosine-3'-phosphate
  modified_base 9: mod_base = OTHER; note = 2'-deoxy-2'-fluoro-adenosine-3'-phosphate
  modified_base 10: mod_base = OTHER; note = 2'-O-methyl-uridine-3'-phosphate
  modified_base 11: mod_base = OTHER; note = 2'-O-methyl-guanosine-3'-phosphate
  modified_base 12: mod_base = OTHER; note = 2'-O-methyl-cytidine-3'-phosphate
  modified_base 13: mod_base = OTHER; note = 2'-O-methyl-uridine-3'-phosphate
  modified_base 14: mod_base = OTHER; note = 2'-O-methyl-uridine-3'-phosphate
  modified_base 15: mod_base = OTHER; note = 2'-O-methyl-cytidine-3'-phosphate
  modified_base 16: mod_base = OTHER; note = 2'-O-methyl-uridine-3'-phosphate
  modified_base 17: mod_base = OTHER; note = 2'-O-methyl-cytidine-3'-phosphate
  modified_base 18: mod_base = OTHER; note = 2'-O-methyl-uridine-3'-phosphate
  modified_base 19: mod_base = OTHER; note = 2'-O-methyl-adenosine-3'-phosphate
tcatcgtgatgcttctcta

SEQ ID NO: 1390 - RNA, 19 nt, synthetic construct
  source 1..19: mol_type = other RNA
  modified_base 1: mod_base = OTHER; note = 2'-O-methyl-cytidine-3'-phosphorothioate
  modified_base 2: mod_base = OTHER; note = 2'-O-methyl-adenosine-3'-phosphorothioate
  modified_base 3: mod_base = OTHER; note = 2'-O-methyl-uridine-3'-phosphate
  modified_base 4: mod_base = OTHER; note = 2'-O-methyl-cytidine-3'-phosphate
  modified_base 5: mod_base = OTHER; note = 2'-deoxy-2'-fluoro-guanosine-3'-phosphate
  modified_base 6: mod_base = OTHER; note = 2'-O-methyl-uridine-3'-phosphate
  modified_base 7: mod_base = OTHER; note = 2'-deoxy-2'-fluoro-guanosine-3'-phosphate
  modified_base 8: mod_base = OTHER; note = 2'-deoxy-2'-fluoro-adenosine-3'-phosphate
  modified_base 9: mod_base = OTHER; note = 2'-deoxy-2'-fluoro-uridine-3'-phosphate
  modified_base 10: mod_base = OTHER; note = 2'-O-methyl-guanosine-3'-phosphate
  modified_base 11: mod_base = OTHER; note = 2'-O-methyl-cytidine-3'-phosphate
  modified_base 12: mod_base = OTHER; note = 2'-O-methyl-uridine-3'-phosphate
  modified_base 13: mod_base = OTHER; note = 2'-O-methyl-uridine-3'-phosphate
  modified_base 14: mod_base = OTHER; note = 2'-O-methyl-cytidine-3'-phosphate
  modified_base 15: mod_base = OTHER; note = 2'-O-methyl-uridine-3'-phosphate
  modified_base 16: mod_base = OTHER; note = 2'-O-methyl-cytidine-3'-phosphate
  modified_base 17: mod_base = OTHER; note = 2'-O-methyl-uridine-3'-phosphate
  modified_base 18: mod_base = OTHER; note = 2'-O-methyl-guanosine-3'-phosphate
  modified_base 19: mod_base = OTHER; note = 2'-O-methyl-adenosine-3'-phosphate
catcgtgatgcttctctga

SEQ ID NO: 1391 - RNA, 19 nt, synthetic construct
  source 1..19: mol_type = other RNA
  modified_base 1: mod_base = OTHER; note = 2'-O-methyl-adenosine-3'-phosphorothioate
  modified_base 2: mod_base = OTHER; note = 2'-O-methyl-uridine-3'-phosphorothioate
  modified_base 3: mod_base = OTHER; note = 2'-O-methyl-cytidine-3'-phosphate
  modified_base 4: mod_base = OTHER; note = 2'-O-methyl-guanosine-3'-phosphate
  modified_base 5: mod_base = OTHER; note = 2'-deoxy-2'-fluoro-uridine-3'-phosphate
  modified_base 6: mod_base = OTHER; note = 2'-O-methyl-guanosine-3'-phosphate
  modified_base 7: mod_base = OTHER; note = 2'-deoxy-2'-fluoro-adenosine-3'-phosphate
  modified_base 8: mod_base = OTHER; note = 2'-deoxy-2'-fluoro-uridine-3'-phosphate
  modified_base 9: mod_base = OTHER; note = 2'-deoxy-2'-fluoro-guanosine-3'-phosphate
  modified_base 10: mod_base = OTHER; note = 2'-O-methyl-cytidine-3'-phosphate
  modified_base 11: mod_base = OTHER; note = 2'-O-methyl-uridine-3'-phosphate
  modified_base 12: mod_base = OTHER; note = 2'-O-methyl-uridine-3'-phosphate
  modified_base 13: mod_base = OTHER; note = 2'-O-methyl-cytidine-3'-phosphate
  modified_base 14: mod_base = OTHER; note = 2'-O-methyl-uridine-3'-phosphate
  modified_base 15: mod_base = OTHER; note = 2'-O-methyl-cytidine-3'-phosphate
  modified_base 16: mod_base = OTHER; note = 2'-O-methyl-uridine-3'-phosphate
  modified_base 17: mod_base = OTHER; note = 2'-O-methyl-guanosine-3'-phosphate
  modified_base 18: mod_base = OTHER; note = 2'-O-methyl-adenosine-3'-phosphate
  modified_base 19: mod_base = OTHER; note = 2'-O-methyl-adenosine-3'-phosphate
atcgtgatgcttctctgaa

SEQ ID NO: 1392 - RNA, 19 nt, synthetic construct
  source 1..19: mol_type = other RNA
  modified_base 1: mod_base = OTHER; note = 2'-O-methyl-uridine-3'-phosphorothioate
  modified_base 2: mod_base = OTHER; note = 2'-O-methyl-cytidine-3'-phosphorothioate
  modified_base 3: mod_base = OTHER; note = 2'-O-methyl-guanosine-3'-phosphate
  modified_base 4: mod_base = OTHER; note = 2'-O-methyl-uridine-3'-phosphate
  modified_base 5: mod_base = OTHER; note = 2'-deoxy-2'-fluoro-guanosine-3'-phosphate
  modified_base 6: mod_base = OTHER; note = 2'-O-methyl-adenosine-3'-phosphate
  modified_base 7: mod_base = OTHER; note = 2'-deoxy-2'-fluoro-uridine-3'-phosphate
  modified_base 8: mod_base = OTHER; note = 2'-deoxy-2'-fluoro-guanosine-3'-phosphate
  modified_base 9: mod_base = OTHER; note = 2'-deoxy-2'-fluoro-cytidine-3'-phosphate
  modified_base 10: mod_base = OTHER; note = 2'-O-methyl-uridine-3'-phosphate
  modified_base 11: mod_base = OTHER; note = 2'-O-methyl-uridine-3'-phosphate
  modified_base 12: mod_base = OTHER; note = 2'-O-methyl-cytidine-3'-phosphate
  modified_base 13: mod_base = OTHER; note = 2'-O-methyl-uridine-3'-phosphate
  modified_base 14: mod_base = OTHER; note = 2'-O-methyl-cytidine-3'-phosphate
  modified_base 15: mod_base = OTHER; note = 2'-O-methyl-uridine-3'-phosphate
  modified_base 16: mod_base = OTHER; note = 2'-O-methyl-guanosine-3'-phosphate
  modified_base 17: mod_base = OTHER; note = 2'-O-methyl-adenosine-3'-phosphate
  modified_base 18: mod_base = OTHER; note = 2'-O-methyl-adenosine-3'-phosphate
  modified_base 19: mod_base = OTHER; note = 2'-O-methyl-adenosine-3'-phosphate
tcgtgatgcttctctgaaa

SEQ ID NO: 1393 - RNA, 19 nt, synthetic construct
  source 1..19: mol_type = other RNA
  modified_base 1: mod_base = OTHER; note = 2'-O-methyl-cytidine-3'-phosphorothioate
  modified_base 2: mod_base = OTHER; note = 2'-O-methyl-guanosine-3'-phosphorothioate
  modified_base 3: mod_base = OTHER; note = 2'-O-methyl-uridine-3'-phosphate
  modified_base 4: mod_base = OTHER; note = 2'-O-methyl-guanosine-3'-phosphate
  modified_base 5: mod_base = OTHER; note = 2'-deoxy-2'-fluoro-adenosine-3'-phosphate
  modified_base 6: mod_base = OTHER; note = 2'-O-methyl-uridine-3'-phosphate
  modified_base 7: mod_base = OTHER; note = 2'-deoxy-2'-fluoro-guanosine-3'-phosphate
  modified_base 8: mod_base = OTHER; note = 2'-deoxy-2'-fluoro-cytidine-3'-phosphate
  modified_base 9: mod_base = OTHER; note = 2'-deoxy-2'-fluoro-uridine-3'-phosphate
  modified_base 10: mod_base = OTHER; note = 2'-O-methyl-uridine-3'-phosphate
  modified_base 11: mod_base = OTHER; note = 2'-O-methyl-cytidine-3'-phosphate
  modified_base 12: mod_base = OTHER; note = 2'-O-methyl-uridine-3'-phosphate
  modified_base 13: mod_base = OTHER; note = 2'-O-methyl-cytidine-3'-phosphate
  modified_base 14: mod_base = OTHER; note = 2'-O-methyl-uridine-3'-phosphate
  modified_base 15: mod_base = OTHER; note = 2'-O-methyl-guanosine-3'-phosphate
  modified_base 16: mod_base = OTHER; note = 2'-O-methyl-adenosine-3'-phosphate
  modified_base 17: mod_base = OTHER; note = 2'-O-methyl-adenosine-3'-phosphate
  modified_base 18: mod_base = OTHER; note = 2'-O-methyl-guanosine-3'-phosphate
  modified_base 19: mod_base = OTHER; note = 2'-O-methyl-adenosine-3'-phosphate
cgtgatgcttctctgaaga

SEQ ID NO: 1394 - RNA, 19 nt, synthetic construct
  source 1..19: mol_type = other RNA
  modified_base 1: mod_base = OTHER; note = 2'-O-methyl-uridine-3'-phosphorothioate
  modified_base 2: mod_base = OTHER; note = 2'-O-methyl-cytidine-3'-phosphorothioate
  modified_base 3: mod_base = OTHER; note = 2'-O-methyl-uridine-3'-phosphate
  modified_base 4: mod_base = OTHER; note = 2'-O-methyl-guanosine-3'-phosphate
  modified_base 5: mod_base = OTHER; note = 2'-deoxy-2'-fluoro-adenosine-3'-phosphate
  modified_base 6: mod_base = OTHER; note = 2'-O-methyl-adenosine-3'-phosphate
  modified_base 7: mod_base = OTHER; note = 2'-deoxy-2'-fluoro-guanosine-3'-phosphate
  modified_base 8: mod_base = OTHER; note = 2'-deoxy-2'-fluoro-uridine-3'-phosphate
  modified_base 9: mod_base = OTHER; note = 2'-deoxy-2'-fluoro-uridine-3'-phosphate
  modified_base 10: mod_base = OTHER; note = 2'-O-methyl-cytidine-3'-phosphate
  modified_base 11: mod_base = OTHER; note = 2'-O-methyl-uridine-3'-phosphate
  modified_base 12: mod_base = OTHER; note = 2'-O-methyl-guanosine-3'-phosphate
  modified_base 13: mod_base = OTHER; note = 2'-O-methyl-cytidine-3'-phosphate
  modified_base 14: mod_base = OTHER; note = 2'-O-methyl-uridine-3'-phosphate
  modified_base 15: mod_base = OTHER; note = 2'-O-methyl-adenosine-3'-phosphate
  modified_base 16: mod_base = OTHER; note = 2'-O-methyl-cytidine-3'-phosphate
  modified_base 17: mod_base = OTHER; note = 2'-O-methyl-adenosine-3'-phosphate
  modified_base 18: mod_base = OTHER; note = 2'-O-methyl-adenosine-3'-phosphate
  modified_base 19: mod_base = OTHER; note = 2'-O-methyl-adenosine-3'-phosphate
tctgaagttctgctacaaa

SEQ ID NO: 1395 - RNA, 19 nt, synthetic construct
  source 1..19: mol_type = other RNA
  modified_base 1: mod_base = OTHER; note = 2'-O-methyl-cytidine-3'-phosphorothioate
  modified_base 2: mod_base = OTHER; note = 2'-O-methyl-uridine-3'-phosphorothioate
  modified_base 3: mod_base = OTHER; note = 2'-O-methyl-guanosine-3'-phosphate
  modified_base 4: mod_base = OTHER; note = 2'-O-methyl-adenosine-3'-phosphate
  modified_base 5: mod_base = OTHER; note = 2'-deoxy-2'-fluoro-adenosine-3'-phosphate
  modified_base 6: mod_base = OTHER; note = 2'-O-methyl-guanosine-3'-phosphate
  modified_base 7: mod_base = OTHER; note = 2'-deoxy-2'-fluoro-uridine-3'-phosphate
  modified_base 8: mod_base = OTHER; note = 2'-deoxy-2'-fluoro-uridine-3'-phosphate
  modified_base 9: mod_base = OTHER; note = 2'-deoxy-2'-fluoro-cytidine-3'-phosphate
  modified_base 10: mod_base = OTHER; note = 2'-O-methyl-uridine-3'-phosphate
  modified_base 11: mod_base = OTHER; note = 2'-O-methyl-guanosine-3'-phosphate
  modified_base 12: mod_base = OTHER; note = 2'-O-methyl-cytidine-3'-phosphate
  modified_base 13: mod_base = OTHER; note = 2'-O-methyl-uridine-3'-phosphate
  modified_base 14: mod_base = OTHER; note = 2'-O-methyl-adenosine-3'-phosphate
  modified_base 15: mod_base = OTHER; note = 2'-O-methyl-cytidine-3'-phosphate
  modified_base 16: mod_base = OTHER; note = 2'-O-methyl-adenosine-3'-phosphate
  modified_base 17: mod_base = OTHER; note = 2'-O-methyl-adenosine-3'-phosphate
  modified_base 18: mod_base = OTHER; note = 2'-O-methyl-cytidine-3'-phosphate
  modified_base 19: mod_base = OTHER; note = 2'-O-methyl-adenosine-3'-phosphate
ctgaagttctgctacaaca

SEQ ID NO: 1396 - RNA, 19 nt, synthetic construct
  source 1..19: mol_type = other RNA
  modified_base 1: mod_base = OTHER; note = 2'-O-methyl-uridine-3'-phosphorothioate
  modified_base 2: mod_base = OTHER; note = 2'-O-methyl-guanosine-3'-phosphorothioate
  modified_base 3: mod_base = OTHER; note = 2'-O-methyl-adenosine-3'-phosphate
  modified_base 4: mod_base = OTHER; note = 2'-O-methyl-adenosine-3'-phosphate
  modified_base 5: mod_base = OTHER; note = 2'-deoxy-2'-fluoro-guanosine-3'-phosphate
  modified_base 6: mod_base = OTHER; note = 2'-O-methyl-uridine-3'-phosphate
  modified_base 7: mod_base = OTHER; note = 2'-deoxy-2'-fluoro-uridine-3'-phosphate
  modified_base 8: mod_base = OTHER; note = 2'-deoxy-2'-fluoro-cytidine-3'-phosphate
  modified_base 9: mod_base = OTHER; note = 2'-deoxy-2'-fluoro-uridine-3'-phosphate
  modified_base 10: mod_base = OTHER; note = 2'-O-methyl-guanosine-3'-phosphate
  modified_base 11: mod_base = OTHER; note = 2'-O-methyl-cytidine-3'-phosphate
  modified_base 12: mod_base = OTHER; note = 2'-O-methyl-uridine-3'-phosphate
  modified_base 13: mod_base = OTHER; note = 2'-O-methyl-adenosine-3'-phosphate
  modified_base 14: mod_base = OTHER; note = 2'-O-methyl-cytidine-3'-phosphate
  modified_base 15: mod_base = OTHER; note = 2'-O-methyl-adenosine-3'-phosphate
  modified_base 16: mod_base = OTHER; note = 2'-O-methyl-adenosine-3'-phosphate
  modified_base 17: mod_base = OTHER; note = 2'-O-methyl-cytidine-3'-phosphate
  modified_base 18: mod_base = OTHER; note = 2'-O-methyl-cytidine-3'-phosphate
  modified_base 19: mod_base = OTHER; note = 2'-O-methyl-adenosine-3'-phosphate
tgaagttctgctacaacca

SEQ ID NO: 1397 - RNA, 19 nt, synthetic construct
  source 1..19: mol_type = other RNA
  modified_base 1: mod_base = OTHER; note = 2'-O-methyl-uridine-3'-phosphorothioate
  modified_base 2: mod_base = OTHER; note = 2'-O-methyl-uridine-3'-phosphorothioate
  modified_base 3: mod_base = OTHER; note = 2'-O-methyl-cytidine-3'-phosphate
  modified_base 4: mod_base = OTHER; note = 2'-O-methyl-uridine-3'-phosphate
  modified_base 5: mod_base = OTHER; note = 2'-deoxy-2'-fluoro-guanosine-3'-phosphate
  modified_base 6: mod_base = OTHER; note = 2'-O-methyl-cytidine-3'-phosphate
  modified_base 7: mod_base = OTHER; note = 2'-deoxy-2'-fluoro-uridine-3'-phosphate
  modified_base 8: mod_base = OTHER; note = 2'-deoxy-2'-fluoro-adenosine-3'-phosphate
  modified_base 9: mod_base = OTHER; note = 2'-deoxy-2'-fluoro-cytidine-3'-phosphate
  modified_base 10: mod_base = OTHER; note = 2'-O-methyl-adenosine-3'-phosphate
  modified_base 11: mod_base = OTHER; note = 2'-O-methyl-adenosine-3'-phosphate
  modified_base 12: mod_base = OTHER; note = 2'-O-methyl-cytidine-3'-phosphate
  modified_base 13: mod_base = OTHER; note = 2'-O-methyl-cytidine-3'-phosphate
  modified_base 14: mod_base = OTHER; note = 2'-O-methyl-uridine-3'-phosphate
  modified_base 15: mod_base = OTHER; note = 2'-O-methyl-cytidine-3'-phosphate
  modified_base 16: mod_base = OTHER; note = 2'-O-methyl-uridine-3'-phosphate
  modified_base 17: mod_base = OTHER; note = 2'-O-methyl-adenosine-3'-phosphate
  modified_base 18: mod_base = OTHER; note = 2'-O-methyl-guanosine-3'-phosphate
  modified_base 19: mod_base = OTHER; note = 2'-O-methyl-adenosine-3'-phosphate
ttctgctacaacctctaga

SEQ ID NO: 1398 - RNA, 19 nt, synthetic construct
  source 1..19: mol_type = other RNA
  modified_base 1: mod_base = OTHER; note = 2'-O-methyl-guanosine-3'-phosphorothioate
  modified_base 2: mod_base = OTHER; note = 2'-O-methyl-cytidine-3'-phosphorothioate
  modified_base 3: mod_base = OTHER; note = 2'-O-methyl-uridine-3'-phosphate
  modified_base 4: mod_base = OTHER; note = 2'-O-methyl-adenosine-3'-phosphate
  modified_base 5: mod_base = OTHER; note = 2'-deoxy-2'-fluoro-cytidine-3'-phosphate
  modified_base 6: mod_base = OTHER; note = 2'-O-methyl-adenosine-3'-phosphate
  modified_base 7: mod_base = OTHER; note = 2'-deoxy-2'-fluoro-adenosine-3'-phosphate
  modified_base 8: mod_base = OTHER; note = 2'-deoxy-2'-fluoro-cytidine-3'-phosphate
  modified_base 9: mod_base = OTHER; note = 2'-deoxy-2'-fluoro-cytidine-3'-phosphate
  modified_base 10: mod_base = OTHER; note = 2'-O-methyl-uridine-3'-phosphate
  modified_base 11: mod_base = OTHER; note = 2'-O-methyl-cytidine-3'-phosphate
  modified_base 12: mod_base = OTHER; note = 2'-O-methyl-uridine-3'-phosphate
  modified_base 13: mod_base = OTHER; note = 2'-O-methyl-adenosine-3'-phosphate
  modified_base 14: mod_base = OTHER; note = 2'-O-methyl-guanosine-3'-phosphate
  modified_base 15: mod_base = OTHER; note = 2'-O-methyl-adenosine-3'-phosphate
  modified_base 16: mod_base = OTHER; note = 2'-O-methyl-uridine-3'-phosphate
  modified_base 17: mod_base = OTHER; note = 2'-O-methyl-cytidine-3'-phosphate
  modified_base 18: mod_base = OTHER; note = 2'-O-methyl-uridine-3'-phosphate
  modified_base 19: mod_base = OTHER; note = 2'-O-methyl-adenosine-3'-phosphate
gctacaacctctagatcta

SEQ ID NO: 1399 - RNA, 19 nt, synthetic construct
  source 1..19: mol_type = other RNA
  modified_base 1: mod_base = OTHER; note = 2'-O-methyl-adenosine-3'-phosphorothioate
  modified_base 2: mod_base = OTHER; note = 2'-O-methyl-adenosine-3'-phosphorothioate
  modified_base 3: mod_base = OTHER; note = 2'-O-methyl-adenosine-3'-phosphate
  modified_base 4: mod_base = OTHER; note = 2'-O-methyl-uridine-3'-phosphate
  modified_base 5: mod_base = OTHER; note = 2'-deoxy-2'-fluoro-cytidine-3'-phosphate
  modified_base 6: mod_base = OTHER; note = 2'-O-methyl-uridine-3'-phosphate
  modified_base 7: mod_base = OTHER; note = 2'-deoxy-2'-fluoro-guanosine-3'-phosphate
  modified_base 8: mod_base = OTHER; note = 2'-deoxy-2'-fluoro-uridine-3'-phosphate
  modified_base 9: mod_base = OTHER; note = 2'-deoxy-2'-fluoro-cytidine-3'-phosphate
  modified_base 10: mod_base = OTHER; note = 2'-O-methyl-adenosine-3'-phosphate
  modified_base 11: mod_base = OTHER; note = 2'-O-methyl-uridine-3'-phosphate
  modified_base 12: mod_base = OTHER; note = 2'-O-methyl-cytidine-3'-phosphate
  modified_base 13: mod_base = OTHER; note = 2'-O-methyl-cytidine-3'-phosphate
  modified_base 14: mod_base = OTHER; note = 2'-O-methyl-cytidine-3'-phosphate
  modified_base 15: mod_base = OTHER; note = 2'-O-methyl-adenosine-3'-phosphate
  modified_base 16: mod_base = OTHER; note = 2'-O-methyl-uridine-3'-phosphate
  modified_base 17: mod_base = OTHER; note = 2'-O-methyl-guanosine-3'-phosphate
  modified_base 18: mod_base = OTHER; note = 2'-O-methyl-cytidine-3'-phosphate
  modified_base 19: mod_base = OTHER; note = 2'-O-methyl-adenosine-3'-phosphate
aaatctgtcatcccatgca

SEQ ID NO: 1400 - RNA, 19 nt, synthetic construct
  source 1..19: mol_type = other RNA
  modified_base 1: mod_base = OTHER; note = 2'-O-methyl-adenosine-3'-phosphorothioate
  modified_base 2: mod_base = OTHER; note = 2'-O-methyl-adenosine-3'-phosphorothioate
  modified_base 3: mod_base = OTHER; note = 2'-O-methyl-uridine-3'-phosphate
  modified_base 4: mod_base = OTHER; note = 2'-O-methyl-cytidine-3'-phosphate
  modified_base 5: mod_base = OTHER; note = 2'-deoxy-2'-fluoro-uridine-3'-phosphate
  modified_base 6: mod_base = OTHER; note = 2'-O-methyl-guanosine-3'-phosphate
  modified_base 7: mod_base = OTHER; note = 2'-deoxy-2'-fluoro-uridine-3'-phosphate
  modified_base 8: mod_base = OTHER; note = 2'-deoxy-2'-fluoro-cytidine-3'-phosphate
  modified_base 9: mod_base = OTHER; note = 2'-deoxy-2'-fluoro-adenosine-3'-phosphate
  modified_base 10: mod_base = OTHER; note = 2'-O-methyl-uridine-3'-phosphate
  modified_base 11: mod_base = OTHER; note = 2'-O-methyl-cytidine-3'-phosphate
  modified_base 12: mod_base = OTHER; note = 2'-O-methyl-cytidine-3'-phosphate
  modified_base 13: mod_base = OTHER; note = 2'-O-methyl-cytidine-3'-phosphate
  modified_base 14: mod_base = OTHER; note = 2'-O-methyl-adenosine-3'-phosphate
  modified_base 15: mod_base = OTHER; note = 2'-O-methyl-uridine-3'-phosphate
  modified_base 16: mod_base = OTHER; note = 2'-O-methyl-guanosine-3'-phosphate
  modified_base 17: mod_base = OTHER; note = 2'-O-methyl-cytidine-3'-phosphate
  modified_base 18: mod_base = OTHER; note = 2'-O-methyl-adenosine-3'-phosphate
  modified_base 19: mod_base = OTHER; note = 2'-O-methyl-adenosine-3'-phosphate
aatctgtcatcccatgcaa

SEQ ID NO: 1401 - RNA, 19 nt, synthetic construct
  source 1..19: mol_type = other RNA
  modified_base 1: mod_base = OTHER; note = 2'-O-methyl-cytidine-3'-phosphorothioate
  modified_base 2: mod_base = OTHER; note = 2'-O-methyl-cytidine-3'-phosphorothioate
  modified_base 3: mod_base = OTHER; note = 2'-O-methyl-uridine-3'-phosphate
  modified_base 4: mod_base = OTHER; note = 2'-O-methyl-guanosine-3'-phosphate
  modified_base 5: mod_base = OTHER; note = 2'-deoxy-2'-fluoro-adenosine-3'-phosphate
  modified_base 6: mod_base = OTHER; note = 2'-O-methyl-guanosine-3'-phosphate
  modified_base 7: mod_base = OTHER; note = 2'-deoxy-2'-fluoro-uridine-3'-phosphate
  modified_base 8: mod_base = OTHER; note = 2'-deoxy-2'-fluoro-adenosine-3'-phosphate
  modified_base 9: mod_base = OTHER; note = 2'-deoxy-2'-fluoro-guanosine-3'-phosphate
  modified_base 10: mod_base = OTHER; note = 2'-O-methyl-adenosine-3'-phosphate
  modified_base 11: mod_base = OTHER; note = 2'-O-methyl-adenosine-3'-phosphate
  modified_base 12: mod_base = OTHER; note = 2'-O-methyl-guanosine-3'-phosphate
  modified_base 13: mod_base = OTHER; note = 2'-O-methyl-adenosine-3'-phosphate
  modified_base 14: mod_base = OTHER; note = 2'-O-methyl-guanosine-3'-phosphate
  modified_base 15: mod_base = OTHER; note = 2'-O-methyl-uridine-3'-phosphate
  modified_base 16: mod_base = OTHER; note = 2'-O-methyl-uridine-3'-phosphate
  modified_base 17: mod_base = OTHER; note = 2'-O-methyl-uridine-3'-phosphate
  modified_base 18: mod_base = OTHER; note = 2'-O-methyl-cytidine-3'-phosphate
  modified_base 19: mod_base = OTHER; note = 2'-O-methyl-adenosine-3'-phosphate
cctgagtagaagagtttca

SEQ ID NO: 1402 - RNA, 19 nt, synthetic construct
  source 1..19: mol_type = other RNA
  modified_base 1: mod_base = OTHER; note = 2'-O-methyl-uridine-3'-phosphorothioate
  modified_base 2: mod_base = OTHER; note = 2'-O-methyl-uridine-3'-phosphorothioate
  modified_base 3: mod_base = OTHER; note = 2'-O-methyl-guanosine-3'-phosphate
  modified_base 4: mod_base = OTHER; note = 2'-O-methyl-uridine-3'-phosphate
  modified_base 5: mod_base = OTHER; note = 2'-deoxy-2'-fluoro-guanosine-3'-phosphate
  modified_base 6: mod_base = OTHER; note = 2'-O-methyl-adenosine-3'-phosphate
  modified_base 7: mod_base = OTHER; note = 2'-deoxy-2'-fluoro-adenosine-3'-phosphate
  modified_base 8: mod_base = OTHER; note = 2'-deoxy-2'-fluoro-adenosine-3'-phosphate
  modified_base 9: mod_base = OTHER; note = 2'-deoxy-2'-fluoro-adenosine-3'-phosphate
  modified_base 10: mod_base = OTHER; note = 2'-O-methyl-guanosine-3'-phosphate
  modified_base 11: mod_base = OTHER; note = 2'-O-methyl-guanosine-3'-phosphate
  modified_base 12: mod_base = OTHER; note = 2'-O-methyl-uridine-3'-phosphate
  modified_base 13: mod_base = OTHER; note = 2'-O-methyl-cytidine-3'-phosphate
  modified_base 14: mod_base = OTHER; note = 2'-O-methyl-adenosine-3'-phosphate
  modified_base 15: mod_base = OTHER; note = 2'-O-methyl-adenosine-3'-phosphate
  modified_base 16: mod_base = OTHER; note = 2'-O-methyl-guanosine-3'-phosphate
  modified_base 17: mod_base = OTHER; note = 2'-O-methyl-adenosine-3'-phosphate
  modified_base 18: mod_base = OTHER; note = 2'-O-methyl-uridine-3'-phosphate
  modified_base 19: mod_base = OTHER; note = 2'-O-methyl-adenosine-3'-phosphate
ttgtgaaaaggtcaagata

SEQ ID NO: 1403 - RNA, 19 nt, synthetic construct
  source 1..19: mol_type = other RNA
  modified_base 1: mod_base = OTHER; note = 2'-O-methyl-uridine-3'-phosphorothioate
  modified_base 2: mod_base = OTHER; note = 2'-O-methyl-guanosine-3'-phosphorothioate
  modified_base 3: mod_base = OTHER; note = 2'-O-methyl-uridine-3'-phosphate
  modified_base 4: mod_base = OTHER; note = 2'-O-methyl-guanosine-3'-phosphate
  modified_base 5: mod_base = OTHER; note = 2'-deoxy-2'-fluoro-adenosine-3'-phosphate
  modified_base 6: mod_base = OTHER; note = 2'-O-methyl-adenosine-3'-phosphate
  modified_base 7: mod_base = OTHER; note = 2'-deoxy-2'-fluoro-adenosine-3'-phosphate
  modified_base 8: mod_base = OTHER; note = 2'-deoxy-2'-fluoro-adenosine-3'-phosphate
  modified_base 9: mod_base = OTHER; note = 2'-deoxy-2'-fluoro-guanosine-3'-phosphate
  modified_base 10: mod_base = OTHER; note = 2'-O-methyl-guanosine-3'-phosphate
  modified_base 11: mod_base = OTHER; note = 2'-O-methyl-uridine-3'-phosphate
  modified_base 12: mod_base = OTHER; note = 2'-O-methyl-cytidine-3'-phosphate
  modified_base 13: mod_base = OTHER; note = 2'-O-methyl-adenosine-3'-phosphate
  modified_base 14: mod_base = OTHER; note = 2'-O-methyl-adenosine-3'-phosphate
  modified_base 15: mod_base = OTHER; note = 2'-O-methyl-guanosine-3'-phosphate
  modified_base 16: mod_base = OTHER; note = 2'-O-methyl-adenosine-3'-phosphate
  modified_base 17: mod_base = OTHER; note = 2'-O-methyl-uridine-3'-phosphate
  modified_base 18: mod_base = OTHER; note = 2'-O-methyl-uridine-3'-phosphate
  modified_base 19: mod_base = OTHER; note = 2'-O-methyl-adenosine-3'-phosphate
tgtgaaaaggtcaagatta

SEQ ID NO: 1404 - RNA, 19 nt, synthetic construct
  source 1..19: mol_type = other RNA
  modified_base 1: mod_base = OTHER; note = 2'-O-methyl-adenosine-3'-phosphorothioate
  modified_base 2: mod_base = OTHER; note = 2'-O-methyl-adenosine-3'-phosphorothioate
  modified_base 3: mod_base = OTHER; note = 2'-O-methyl-adenosine-3'-phosphate
  modified_base 4: mod_base = OTHER; note = 2'-O-methyl-adenosine-3'-phosphate
  modified_base 5: mod_base = OTHER; note = 2'-deoxy-2'-fluoro-guanosine-3'-phosphate
  modified_base 6: mod_base = OTHER; note = 2'-O-methyl-guanosine-3'-phosphate
  modified_base 7: mod_base = OTHER; note = 2'-deoxy-2'-fluoro-uridine-3'-phosphate
  modified_base 8: mod_base = OTHER; note = 2'-deoxy-2'-fluoro-cytidine-3'-phosphate
  modified_base 9: mod_base = OTHER; note = 2'-deoxy-2'-fluoro-adenosine-3'-phosphate
  modified_base 10: mod_base = OTHER; note = 2'-O-methyl-adenosine-3'-phosphate
  modified_base 11: mod_base = OTHER; note = 2'-O-methyl-guanosine-3'-phosphate
  modified_base 12: mod_base = OTHER; note = 2'-O-methyl-adenosine-3'-phosphate
  modified_base 13: mod_base = OTHER; note = 2'-O-methyl-uridine-3'-phosphate
  modified_base 14: mod_base = OTHER; note = 2'-O-methyl-uridine-3'-phosphate
  modified_base 15: mod_base = OTHER; note = 2'-O-methyl-adenosine-3'-phosphate
  modified_base 16: mod_base = OTHER; note = 2'-O-methyl-adenosine-3'-phosphate
  modified_base 17: mod_base = OTHER; note = 2'-O-methyl-guanosine-3'-phosphate
  modified_base 18: mod_base = OTHER; note = 2'-O-methyl-adenosine-3'-phosphate
  modified_base 19: mod_base = OTHER; note = 2'-O-methyl-adenosine-3'-phosphate
aaaaggtcaagattaagaa

SEQ ID NO: 1405 - RNA, 19 nt, synthetic construct
  source 1..19: mol_type = other RNA
  modified_base 1: mod_base = OTHER; note = 2'-O-methyl-adenosine-3'-phosphorothioate
  modified_base 2: mod_base = OTHER; note = 2'-O-methyl-guanosine-3'-phosphorothioate
  modified_base 3: mod_base = OTHER; note = 2'-O-methyl-guanosine-3'-phosphate
  modified_base 4: mod_base = OTHER; note = 2'-O-methyl-uridine-3'-phosphate
  modified_base 5: mod_base = OTHER; note = 2'-deoxy-2'-fluoro-cytidine-3'-phosphate
  modified_base 6: mod_base = OTHER; note = 2'-O-methyl-adenosine-3'-phosphate
  modified_base 7: mod_base = OTHER; note = 2'-deoxy-2'-fluoro-adenosine-3'-phosphate
  modified_base 8: mod_base = OTHER; note = 2'-deoxy-2'-fluoro-guanosine-3'-phosphate
  modified_base 9: mod_base = OTHER; note = 2'-deoxy-2'-fluoro-adenosine-3'-phosphate
  modified_base 10: mod_base = OTHER; note = 2'-O-methyl-uridine-3'-phosphate
  modified_base 11: mod_base = OTHER; note = 2'-O-methyl-uridine-3'-phosphate
  modified_base 12: mod_base = OTHER; note = 2'-O-methyl-adenosine-3'-phosphate
  modified_base 13: mod_base = OTHER; note = 2'-O-methyl-adenosine-3'-phosphate
  modified_base 14: mod_base = OTHER; note = 2'-O-methyl-guanosine-3'-phosphate
  modified_base 15: mod_base = OTHER; note = 2'-O-methyl-adenosine-3'-phosphate
  modified_base 16: mod_base = OTHER; note = 2'-O-methyl-cytidine-3'-phosphate
  modified_base 17: mod_base = OTHER; note = 2'-O-methyl-uridine-3'-phosphate
  modified_base 18: mod_base = OTHER; note = 2'-O-methyl-adenosine-3'-phosphate
  modified_base 19: mod_base = OTHER; note = 2'-O-methyl-adenosine-3'-phosphate
aggtcaagattaagactaa

SEQ ID NO: 1406 - RNA, 19 nt, synthetic construct
  source 1..19: mol_type = other RNA
  modified_base 1: mod_base = OTHER; note = 2'-O-methyl-guanosine-3'-phosphorothioate
  modified_base 2: mod_base = OTHER; note = 2'-O-methyl-uridine-3'-phosphorothioate
  modified_base 3: mod_base = OTHER; note = 2'-O-methyl-cytidine-3'-phosphate
  modified_base 4: mod_base = OTHER; note = 2'-O-methyl-adenosine-3'-phosphate
  modified_base 5: mod_base = OTHER; note = 2'-deoxy-2'-fluoro-adenosine-3'-phosphate
  modified_base 6: mod_base = OTHER; note = 2'-O-methyl-guanosine-3'-phosphate
  modified_base 7: mod_base = OTHER; note = 2'-deoxy-2'-fluoro-adenosine-3'-phosphate
  modified_base 8: mod_base = OTHER; note = 2'-deoxy-2'-fluoro-uridine-3'-phosphate
  modified_base 9: mod_base = OTHER; note = 2'-deoxy-2'-fluoro-uridine-3'-phosphate
  modified_base 10: mod_base = OTHER; note = 2'-O-methyl-adenosine-3'-phosphate
  modified_base 11: mod_base = OTHER; note = 2'-O-methyl-adenosine-3'-phosphate
  modified_base 12: mod_base = OTHER; note = 2'-O-methyl-guanosine-3'-phosphate
  modified_base 13: mod_base = OTHER; note = 2'-O-methyl-adenosine-3'-phosphate
  modified_base 14: mod_base = OTHER; note = 2'-O-methyl-cytidine-3'-phosphate
  modified_base 15: mod_base = OTHER; note = 2'-O-methyl-uridine-3'-phosphate
  modified_base 16: mod_base = OTHER; note = 2'-O-methyl-adenosine-3'-phosphate
  modified_base 17: mod_base = OTHER; note = 2'-O-methyl-adenosine-3'-phosphate
  modified_base 18: mod_base = OTHER; note = 2'-O-methyl-adenosine-3'-phosphate
  modified_base 19: mod_base = OTHER; note = 2'-O-methyl-adenosine-3'-phosphate
gtcaagattaagactaaaa

SEQ ID NO: 1407 - RNA, 19 nt, synthetic construct
  source 1..19: mol_type = other RNA
  modified_base 1: mod_base = OTHER; note = 2'-O-methyl-uridine-3'-phosphorothioate
  modified_base 2: mod_base = OTHER; note = 2'-O-methyl-cytidine-3'-phosphorothioate
  modified_base 3: mod_base = OTHER; note = 2'-O-methyl-adenosine-3'-phosphate
  modified_base 4: mod_base = OTHER; note = 2'-O-methyl-adenosine-3'-phosphate
  modified_base 5: mod_base = OTHER; note = 2'-deoxy-2'-fluoro-guanosine-3'-phosphate
  modified_base 6: mod_base = OTHER; note = 2'-O-methyl-adenosine-3'-phosphate
  modified_base 7: mod_base = OTHER; note = 2'-deoxy-2'-fluoro-uridine-3'-phosphate
  modified_base 8: mod_base = OTHER; note = 2'-deoxy-2'-fluoro-uridine-3'-phosphate
  modified_base 9: mod_base = OTHER; note = 2'-deoxy-2'-fluoro-adenosine-3'-phosphate
  modified_base 10: mod_base = OTHER; note = 2'-O-methyl-adenosine-3'-phosphate
  modified_base 11: mod_base = OTHER; note = 2'-O-methyl-guanosine-3'-phosphate
  modified_base 12: mod_base = OTHER; note = 2'-O-methyl-adenosine-3'-phosphate
  modified_base 13: mod_base = OTHER; note = 2'-O-methyl-cytidine-3'-phosphate
  modified_base 14: mod_base = OTHER; note = 2'-O-methyl-uridine-3'-phosphate
  modified_base 15: mod_base = OTHER; note = 2'-O-methyl-adenosine-3'-phosphate
  modified_base 16: mod_base = OTHER; note = 2'-O-methyl-adenosine-3'-phosphate
  modified_base 17: mod_base = OTHER; note = 2'-O-methyl-adenosine-3'-phosphate
  modified_base 18: mod_base = OTHER; note = 2'-O-methyl-adenosine-3'-phosphate
  modified_base 19: mod_base = OTHER; note = 2'-O-methyl-adenosine-3'-phosphate
tcaagattaagactaaaaa

SEQ ID NO: 1408 - RNA, 19 nt, synthetic construct
  source 1..19: mol_type = other RNA
  modified_base 1: mod_base = OTHER; note = 2'-O-methyl-cytidine-3'-phosphorothioate
  modified_base 2: mod_base = OTHER; note = 2'-O-methyl-adenosine-3'-phosphorothioate
  modified_base 3: mod_base = OTHER; note = 2'-O-methyl-adenosine-3'-phosphate
  modified_base 4: mod_base = OTHER; note = 2'-O-methyl-guanosine-3'-phosphate
  modified_base 5: mod_base = OTHER; note = 2'-deoxy-2'-fluoro-adenosine-3'-phosphate
  modified_base 6: mod_base = OTHER; note = 2'-O-methyl-uridine-3'-phosphate
  modified_base 7: mod_base = OTHER; note = 2'-deoxy-2'-fluoro-uridine-3'-phosphate
  modified_base 8: mod_base = OTHER; note = 2'-deoxy-2'-fluoro-adenosine-3'-phosphate
  modified_base 9: mod_base = OTHER; note = 2'-deoxy-2'-fluoro-adenosine-3'-phosphate
  modified_base 10: mod_base = OTHER; note = 2'-O-methyl-guanosine-3'-phosphate
  modified_base 11: mod_base = OTHER; note = 2'-O-methyl-adenosine-3'-phosphate
  modified_base 12: mod_base = OTHER; note = 2'-O-methyl-cytidine-3'-phosphate
  modified_base 13: mod_base = OTHER; note = 2'-O-methyl-uridine-3'-phosphate
  modified_base 14: mod_base = OTHER; note = 2'-O-methyl-adenosine-3'-phosphate
  modified_base 15: mod_base = OTHER; note = 2'-O-methyl-adenosine-3'-phosphate
  modified_base 16: mod_base = OTHER; note = 2'-O-methyl-adenosine-3'-phosphate
  modified_base 17: mod_base = OTHER; note = 2'-O-methyl-adenosine-3'-phosphate
  modified_base 18: mod_base = OTHER; note = 2'-O-methyl-cytidine-3'-phosphate
  modified_base 19: mod_base = OTHER; note = 2'-O-methyl-adenosine-3'-phosphate
caagattaagactaaaaca

SEQ ID NO: 1409 - RNA, 19 nt, synthetic construct
  source 1..19: mol_type = other RNA
  modified_base 1: mod_base = OTHER; note = 2'-O-methyl-adenosine-3'-phosphorothioate
  modified_base 2: mod_base = OTHER; note = 2'-O-methyl-adenosine-3'-phosphorothioate
  modified_base 3: mod_base = OTHER; note = 2'-O-methyl-guanosine-3'-phosphate
  modified_base 4: mod_base = OTHER; note = 2'-O-methyl-adenosine-3'-phosphate
  modified_base 5: mod_base = OTHER; note = 2'-deoxy-2'-fluoro-uridine-3'-phosphate
  modified_base 6: mod_base = OTHER; note = 2'-O-methyl-uridine-3'-phosphate
  modified_base 7: mod_base = OTHER; note = 2'-deoxy-2'-fluoro-adenosine-3'-phosphate
  modified_base 8: mod_base = OTHER; note = 2'-deoxy-2'-fluoro-adenosine-3'-phosphate
  modified_base 9: mod_base = OTHER; note = 2'-deoxy-2'-fluoro-guanosine-3'-phosphate
  modified_base 10: mod_base = OTHER; note = 2'-O-methyl-adenosine-3'-phosphate
  modified_base 11: mod_base = OTHER; note = 2'-O-methyl-cytidine-3'-phosphate
  modified_base 12: mod_base = OTHER; note = 2'-O-methyl-uridine-3'-phosphate
  modified_base 13: mod_base = OTHER; note = 2'-O-methyl-adenosine-3'-phosphate
  modified_base 14: mod_base = OTHER; note = 2'-O-methyl-adenosine-3'-phosphate
  modified_base 15: mod_base = OTHER; note = 2'-O-methyl-adenosine-3'-phosphate
  modified_base 16: mod_base = OTHER; note = 2'-O-methyl-adenosine-3'-phosphate
  modified_base 17: mod_base = OTHER; note = 2'-O-methyl-cytidine-3'-phosphate
  modified_base 18: mod_base = OTHER; note = 2'-O-methyl-uridine-3'-phosphate
  modified_base 19: mod_base = OTHER; note = 2'-O-methyl-adenosine-3'-phosphate
aagattaagactaaaacta

SEQ ID NO: 1410 - RNA, 19 nt, synthetic construct
  source 1..19: mol_type = other RNA
  modified_base 1: mod_base = OTHER; note = 2'-O-methyl-cytidine-3'-phosphorothioate
  modified_base 2: mod_base = OTHER; note = 2'-O-methyl-adenosine-3'-phosphorothioate
  modified_base 3: mod_base = OTHER; note = 2'-O-methyl-adenosine-3'-phosphate
  modified_base 4: mod_base = OTHER; note = 2'-O-methyl-guanosine-3'-phosphate
  modified_base 5: mod_base = OTHER; note = 2'-deoxy-2'-fluoro-uridine-3'-phosphate
  modified_base 6: mod_base = OTHER; note = 2'-O-methyl-uridine-3'-phosphate
  modified_base 7: mod_base = OTHER; note = 2'-deoxy-2'-fluoro-cytidine-3'-phosphate
  modified_base 8: mod_base = OTHER; note = 2'-deoxy-2'-fluoro-adenosine-3'-phosphate
  modified_base 9: mod_base = OTHER; note = 2'-deoxy-2'-fluoro-cytidine-3'-phosphate
  modified_base 10: mod_base = OTHER; note = 2'-O-methyl-uridine-3'-phosphate
  modified_base 11: mod_base = OTHER; note = 2'-O-methyl-uridine-3'-phosphate
  modified_base 12: mod_base = OTHER; note = 2'-O-methyl-cytidine-3'-phosphate
  modified_base 13: mod_base = OTHER; note = 2'-O-methyl-adenosine-3'-phosphate
  modified_base 14: mod_base = OTHER; note = 2'-O-methyl-uridine-3'-phosphate
  modified_base 15: mod_base = OTHER; note = 2'-O-methyl-adenosine-3'-phosphate
  modified_base 16: mod_base = OTHER; note = 2'-O-methyl-uridine-3'-phosphate
  modified_base 17: mod_base = OTHER; note = 2'-O-methyl-adenosine-3'-phosphate
  modified_base 18: mod_base = OTHER; note = 2'-O-methyl-uridine-3'-phosphate
  modified_base 19: mod_base = OTHER; note = 2'-O-methyl-adenosine-3'-phosphate
caagttcacttcatatata

SEQ ID NO: 1411 - RNA, 19 nt, synthetic construct
  source 1..19: mol_type = other RNA
  modified_base 1: mod_base = OTHER; note = 2'-O-methyl-adenosine-3'-phosphorothioate
  modified_base 2: mod_base = OTHER; note = 2'-O-methyl-adenosine-3'-phosphorothioate
  modified_base 3: mod_base = OTHER; note = 2'-O-methyl-guanosine-3'-phosphate
  modified_base 4: mod_base = OTHER; note = 2'-O-methyl-uridine-3'-phosphate
  modified_base 5: mod_base = OTHER; note = 2'-deoxy-2'-fluoro-uridine-3'-phosphate
  modified_base 6: mod_base = OTHER; note = 2'-O-methyl-cytidine-3'-phosphate
  modified_base 7: mod_base = OTHER; note = 2'-deoxy-2'-fluoro-adenosine-3'-phosphate
  modified_base 8: mod_base = OTHER; note = 2'-deoxy-2'-fluoro-cytidine-3'-phosphate
  modified_base 9: mod_base = OTHER; note = 2'-deoxy-2'-fluoro-uridine-3'-phosphate
  modified_base 10: mod_base = OTHER; note = 2'-O-methyl-uridine-3'-phosphate
  modified_base 11: mod_base = OTHER; note = 2'-O-methyl-cytidine-3'-phosphate
  modified_base 12: mod_base = OTHER; note = 2'-O-methyl-adenosine-3'-phosphate
  modified_base 13: mod_base = OTHER; note = 2'-O-methyl-uridine-3'-phosphate
  modified_base 14: mod_base = OTHER; note = 2'-O-methyl-adenosine-3'-phosphate
  modified_base 15: mod_base = OTHER; note = 2'-O-methyl-uridine-3'-phosphate
  modified_base 16: mod_base = OTHER; note = 2'-O-methyl-adenosine-3'-phosphate
  modified_base 17: mod_base = OTHER; note = 2'-O-methyl-uridine-3'-phosphate
  modified_base 18: mod_base = OTHER; note = 2'-O-methyl-adenosine-3'-phosphate
  modified_base 19: mod_base = OTHER; note = 2'-O-methyl-adenosine-3'-phosphate
aagttcacttcatatataa

SEQ ID NO: 1412 - RNA, 19 nt, synthetic construct
  source 1..19: mol_type = other RNA
  modified_base 1: mod_base = OTHER; note = 2'-O-methyl-adenosine-3'-phosphorothioate
  modified_base 2: mod_base = OTHER; note = 2'-O-methyl-cytidine-3'-phosphorothioate
  modified_base 3: mod_base = OTHER; note = 2'-O-methyl-uridine-3'-phosphate
  modified_base 4: mod_base = OTHER; note = 2'-O-methyl-cytidine-3'-phosphate
  modified_base 5: mod_base = OTHER; note = 2'-deoxy-2'-fluoro-uridine-3'-phosphate
  modified_base 6: mod_base = OTHER; note = 2'-O-methyl-uridine-3'-phosphate
  modified_base 7: mod_base = OTHER; note = 2'-deoxy-2'-fluoro-uridine-3'-phosphate
  modified_base 8: mod_base = OTHER; note = 2'-deoxy-2'-fluoro-uridine-3'-phosphate
  modified_base 9: mod_base = OTHER; note = 2'-deoxy-2'-fluoro-guanosine-3'-phosphate
  modified_base 10: mod_base = OTHER; note = 2'-O-methyl-adenosine-3'-phosphate
  modified_base 11: mod_base = OTHER; note = 2'-O-methyl-guanosine-3'-phosphate
  modified_base 12: mod_base = OTHER; note = 2'-O-methyl-guanosine-3'-phosphate
  modified_base 13: mod_base = OTHER; note = 2'-O-methyl-uridine-3'-phosphate
  modified_base 14: mod_base = OTHER; note = 2'-O-methyl-guanosine-3'-phosphate
  modified_base 15: mod_base = OTHER; note = 2'-O-methyl-adenosine-3'-phosphate
  modified_base 16: mod_base = OTHER; note = 2'-O-methyl-adenosine-3'-phosphate
  modified_base 17: mod_base = OTHER; note = 2'-O-methyl-uridine-3'-phosphate
  modified_base 18: mod_base = OTHER; note = 2'-O-methyl-adenosine-3'-phosphate
  modified_base 19: mod_base = OTHER; note = 2'-O-methyl-adenosine-3'-phosphate
actcttttgaggtgaataa

SEQ ID NO: 1413 - RNA, 19 nt, synthetic construct
  source 1..19: mol_type = other RNA
  modified_base 1: mod_base = OTHER; note = 2'-O-methyl-cytidine-3'-phosphorothioate
  modified_base 2: mod_base = OTHER; note = 2'-O-methyl-uridine-3'-phosphorothioate
  modified_base 3: mod_base = OTHER; note = 2'-O-methyl-cytidine-3'-phosphate
  modified_base 4: mod_base = OTHER; note = 2'-O-methyl-uridine-3'-phosphate
  modified_base 5: mod_base = OTHER; note = 2'-deoxy-2'-fluoro-uridine-3'-phosphate
  modified_base 6: mod_base = OTHER; note = 2'-O-methyl-uridine-3'-phosphate
  modified_base 7: mod_base = OTHER; note = 2'-deoxy-2'-fluoro-uridine-3'-phosphate
  modified_base 8: mod_base = OTHER; note = 2'-deoxy-2'-fluoro-guanosine-3'-phosphate
  modified_base 9: mod_base = OTHER; note = 2'-deoxy-2'-fluoro-adenosine-3'-phosphate
  modified_base 10: mod_base = OTHER; note = 2'-O-methyl-guanosine-3'-phosphate
  modified_base 11: mod_base = OTHER; note = 2'-O-methyl-guanosine-3'-phosphate
  modified_base 12: mod_base = OTHER; note = 2'-O-methyl-uridine-3'-phosphate
  modified_base 13: mod_base = OTHER; note = 2'-O-methyl-guanosine-3'-phosphate
  modified_base 14: mod_base = OTHER; note = 2'-O-methyl-adenosine-3'-phosphate
  modified_base 15: mod_base = OTHER; note = 2'-O-methyl-adenosine-3'-phosphate
  modified_base 16: mod_base = OTHER; note = 2'-O-methyl-uridine-3'-phosphate
  modified_base 17: mod_base = OTHER; note = 2'-O-methyl-adenosine-3'-phosphate
  modified_base 18: mod_base = OTHER; note = 2'-O-methyl-uridine-3'-phosphate
  modified_base 19: mod_base = OTHER; note = 2'-O-methyl-adenosine-3'-phosphate
ctcttttgaggtgaatata

SEQ ID NO: 1414 - RNA, 19 nt, synthetic construct
  source 1..19: mol_type = other RNA
  modified_base 1: mod_base = OTHER; note = 2'-O-methyl-uridine-3'-phosphorothioate
  modified_base 2: mod_base = OTHER; note = 2'-O-methyl-cytidine-3'-phosphorothioate
  modified_base 3: mod_base = OTHER; note = 2'-O-methyl-uridine-3'-phosphate
  modified_base 4: mod_base = OTHER; note = 2'-O-methyl-uridine-3'-phosphate
  modified_base 5: mod_base = OTHER; note = 2'-deoxy-2'-fluoro-uridine-3'-phosphate
  modified_base 6: mod_base = OTHER; note = 2'-O-methyl-uridine-3'-phosphate
  modified_base 7: mod_base = OTHER; note = 2'-deoxy-2'-fluoro-guanosine-3'-phosphate
  modified_base 8: mod_base = OTHER; note = 2'-deoxy-2'-fluoro-adenosine-3'-phosphate
  modified_base 9: mod_base = OTHER; note = 2'-deoxy-2'-fluoro-guanosine-3'-phosphate
  modified_base 10: mod_base = OTHER; note = 2'-O-methyl-guanosine-3'-phosphate
  modified_base 11: mod_base = OTHER; note = 2'-O-methyl-uridine-3'-phosphate
  modified_base 12: mod_base = OTHER; note = 2'-O-methyl-guanosine-3'-phosphate
  modified_base 13: mod_base = OTHER; note = 2'-O-methyl-adenosine-3'-phosphate
  modified_base 14: mod_base = OTHER; note = 2'-O-methyl-adenosine-3'-phosphate
  modified_base 15: mod_base = OTHER; note = 2'-O-methyl-uridine-3'-phosphate
  modified_base 16: mod_base = OTHER; note = 2'-O-methyl-adenosine-3'-phosphate
  modified_base 17: mod_base = OTHER; note = 2'-O-methyl-uridine-3'-phosphate
  modified_base 18: mod_base = OTHER; note = 2'-O-methyl-adenosine-3'-phosphate
  modified_base 19: mod_base = OTHER; note = 2'-O-methyl-adenosine-3'-phosphate
tcttttgaggtgaatataa

SEQ ID NO: 1415 - RNA, 19 nt, synthetic construct
  source 1..19: mol_type = other RNA
  modified_base 1: mod_base = OTHER; note = 2'-O-methyl-uridine-3'-phosphorothioate
  modified_base 2: mod_base = OTHER; note = 2'-O-methyl-cytidine-3'-phosphorothioate
  modified_base 3: mod_base = OTHER; note = 2'-O-methyl-adenosine-3'-phosphate
  modified_base 4: mod_base = OTHER; note = 2'-O-methyl-cytidine-3'-phosphate
  modified_base 5: mod_base = OTHER; note = 2'-deoxy-2'-fluoro-cytidine-3'-phosphate
  modified_base 6: mod_base = OTHER; note = 2'-O-methyl-adenosine-3'-phosphate
  modified_base 7: mod_base = OTHER; note = 2'-deoxy-2'-fluoro-adenosine-3'-phosphate
  modified_base 8: mod_base = OTHER; note = 2'-deoxy-2'-fluoro-guanosine-3'-phosphate
  modified_base 9: mod_base = OTHER; note = 2'-deoxy-2'-fluoro-uridine-3'-phosphate
  modified_base 10: mod_base = OTHER; note = 2'-O-methyl-adenosine-3'-phosphate
  modified_base 11: mod_base = OTHER; note = 2'-O-methyl-uridine-3'-phosphate
  modified_base 12: mod_base = OTHER; note = 2'-O-methyl-cytidine-3'-phosphate
  modified_base 13: mod_base = OTHER; note = 2'-O-methyl-adenosine-3'-phosphate
  modified_base 14: mod_base = OTHER; note = 2'-O-methyl-adenosine-3'-phosphate
  modified_base 15: mod_base = OTHER; note = 2'-O-methyl-adenosine-3'-phosphate
  modified_base 16: mod_base = OTHER; note = 2'-O-methyl-guanosine-3'-phosphate
  modified_base 17: mod_base = OTHER; note = 2'-O-methyl-uridine-3'-phosphate
  modified_base 18: mod_base = OTHER; note = 2'-O-methyl-adenosine-3'-phosphate
  modified_base 19: mod_base = OTHER; note = 2'-O-methyl-adenosine-3'-phosphate
tcaccaagtatcaaagtaa

SEQ ID NO: 1416 - RNA, 19 nt, synthetic construct
  source 1..19: mol_type = other RNA
  modified_base 1: mod_base = OTHER; note = 2'-O-methyl-adenosine-3'-phosphorothioate
  modified_base 2: mod_base = OTHER; note = 2'-O-methyl-cytidine-3'-phosphorothioate
  modified_base 3: mod_base = OTHER; note = 2'-O-methyl-cytidine-3'-phosphate
  modified_base 4: mod_base = OTHER; note = 2'-O-methyl-adenosine-3'-phosphate
  modified_base 5: mod_base = OTHER; note = 2'-deoxy-2'-fluoro-adenosine-3'-phosphate
  modified_base 6: mod_base = OTHER; note = 2'-O-methyl-guanosine-3'-phosphate
  modified_base 7: mod_base = OTHER; note = 2'-deoxy-2'-fluoro-uridine-3'-phosphate
  modified_base 8: mod_base = OTHER; note = 2'-deoxy-2'-fluoro-adenosine-3'-phosphate
  modified_base 9: mod_base = OTHER; note = 2'-deoxy-2'-fluoro-uridine-3'-phosphate
  modified_base 10: mod_base = OTHER; note = 2'-O-methyl-cytidine-3'-phosphate
  modified_base 11: mod_base = OTHER; note = 2'-O-methyl-adenosine-3'-phosphate
  modified_base 12: mod_base = OTHER; note = 2'-O-methyl-adenosine-3'-phosphate
  modified_base 13: mod_base = OTHER; note = 2'-O-methyl-adenosine-3'-phosphate
  modified_base 14: mod_base = OTHER; note = 2'-O-methyl-guanosine-3'-phosphate
  modified_base 15: mod_base = OTHER; note = 2'-O-methyl-uridine-3'-phosphate
  modified_base 16: mod_base = OTHER; note = 2'-O-methyl-adenosine-3'-phosphate
  modified_base 17: mod_base = OTHER; note = 2'-O-methyl-adenosine-3'-phosphate
  modified_base 18: mod_base = OTHER; note = 2'-O-methyl-uridine-3'-phosphate
  modified_base 19: mod_base = OTHER; note = 2'-O-methyl-adenosine-3'-phosphate
accaagtatcaaagtaata

SEQ ID NO: 1417 - RNA, 19 nt, synthetic construct
  source 1..19: mol_type = other RNA
  modified_base 1: mod_base = OTHER; note = 2'-O-methyl-cytidine-3'-phosphorothioate
  modified_base 2: mod_base = OTHER; note = 2'-O-methyl-cytidine-3'-phosphorothioate
  modified_base 3: mod_base = OTHER; note = 2'-O-methyl-adenosine-3'-phosphate
  modified_base 4: mod_base = OTHER; note = 2'-O-methyl-adenosine-3'-phosphate
  modified_base 5: mod_base = OTHER; note = 2'-deoxy-2'-fluoro-guanosine-3'-phosphate
  modified_base 6: mod_base = OTHER; note = 2'-O-methyl-uridine-3'-phosphate
  modified_base 7: mod_base = OTHER; note = 2'-deoxy-2'-fluoro-adenosine-3'-phosphate
  modified_base 8: mod_base = OTHER; note = 2'-deoxy-2'-fluoro-uridine-3'-phosphate
  modified_base 9: mod_base = OTHER; note = 2'-deoxy-2'-fluoro-cytidine-3'-phosphate
  modified_base 10: mod_base = OTHER; note = 2'-O-methyl-adenosine-3'-phosphate
  modified_base 11: mod_base = OTHER; note = 2'-O-methyl-adenosine-3'-phosphate
  modified_base 12: mod_base = OTHER; note = 2'-O-methyl-adenosine-3'-phosphate
  modified_base 13: mod_base = OTHER; note = 2'-O-methyl-guanosine-3'-phosphate
  modified_base 14: mod_base = OTHER; note = 2'-O-methyl-uridine-3'-phosphate
  modified_base 15: mod_base = OTHER; note = 2'-O-methyl-adenosine-3'-phosphate
  modified_base 16: mod_base = OTHER; note = 2'-O-methyl-adenosine-3'-phosphate
  modified_base 17: mod_base = OTHER; note = 2'-O-methyl-uridine-3'-phosphate
  modified_base 18: mod_base = OTHER; note = 2'-O-methyl-adenosine-3'-phosphate
  modified_base 19: mod_base = OTHER; note = 2'-O-methyl-adenosine-3'-phosphate
ccaagtatcaaagtaataa

SEQ ID NO: 1418 - RNA, 19 nt, synthetic construct
  source 1..19: mol_type = other RNA
  modified_base 1: mod_base = OTHER; note = 2'-O-methyl-cytidine-3'-phosphorothioate
  modified_base 2: mod_base = OTHER; note = 2'-O-methyl-adenosine-3'-phosphorothioate
  modified_base 3: mod_base = OTHER; note = 2'-O-methyl-adenosine-3'-phosphate
  modified_base 4: mod_base = OTHER; note = 2'-O-methyl-adenosine-3'-phosphate
  modified_base 5: mod_base = OTHER; note = 2'-deoxy-2'-fluoro-uridine-3'-phosphate
  modified_base 6: mod_base = OTHER; note = 2'-O-methyl-guanosine-3'-phosphate
  modified_base 7: mod_base = OTHER; note = 2'-deoxy-2'-fluoro-adenosine-3'-phosphate
  modified_base 8: mod_base = OTHER; note = 2'-deoxy-2'-fluoro-adenosine-3'-phosphate
  modified_base 9: mod_base = OTHER; note = 2'-deoxy-2'-fluoro-guanosine-3'-phosphate
  modified_base 10: mod_base = OTHER; note = 2'-O-methyl-uridine-3'-phosphate
  modified_base 11: mod_base = OTHER; note = 2'-O-methyl-guanosine-3'-phosphate
  modified_base 12: mod_base = OTHER; note = 2'-O-methyl-uridine-3'-phosphate
  modified_base 13: mod_base = OTHER; note = 2'-O-methyl-cytidine-3'-phosphate
  modified_base 14: mod_base = OTHER; note = 2'-O-methyl-adenosine-3'-phosphate
  modified_base 15: mod_base = OTHER; note = 2'-O-methyl-uridine-3'-phosphate
  modified_base 16: mod_base = OTHER; note = 2'-O-methyl-uridine-3'-phosphate
  modified_base 17: mod_base = OTHER; note = 2'-O-methyl-adenosine-3'-phosphate
  modified_base 18: mod_base = OTHER; note = 2'-O-methyl-uridine-3'-phosphate
  modified_base 19: mod_base = OTHER; note = 2'-O-methyl-adenosine-3'-phosphate
caaatgaagtgtcattata

SEQ ID NO: 1419 - RNA, 19 nt, synthetic construct
  source 1..19: mol_type = other RNA
  modified_base 1: mod_base = OTHER; note = 2'-O-methyl-adenosine-3'-phosphorothioate
  modified_base 2: mod_base = OTHER; note = 2'-O-methyl-adenosine-3'-phosphorothioate
  modified_base 3: mod_base = OTHER; note = 2'-O-methyl-adenosine-3'-phosphate
  modified_base 4: mod_base = OTHER; note = 2'-O-methyl-uridine-3'-phosphate
  modified_base 5: mod_base = OTHER; note = 2'-deoxy-2'-fluoro-guanosine-3'-phosphate
  modified_base 6: mod_base = OTHER; note = 2'-O-methyl-adenosine-3'-phosphate
  modified_base 7: mod_base = OTHER; note = 2'-deoxy-2'-fluoro-adenosine-3'-phosphate
  modified_base 8: mod_base = OTHER; note = 2'-deoxy-2'-fluoro-guanosine-3'-phosphate
  modified_base 9: mod_base = OTHER; note = 2'-deoxy-2'-fluoro-uridine-3'-phosphate
  modified_base 10: mod_base = OTHER; note = 2'-O-methyl-guanosine-3'-phosphate
  modified_base 11: mod_base = OTHER; note = 2'-O-methyl-uridine-3'-phosphate
  modified_base 12: mod_base = OTHER; note = 2'-O-methyl-cytidine-3'-phosphate
  modified_base 13: mod_base = OTHER; note = 2'-O-methyl-adenosine-3'-phosphate
  modified_base 14: mod_base = OTHER; note = 2'-O-methyl-uridine-3'-phosphate
  modified_base 15: mod_base = OTHER; note = 2'-O-methyl-uridine-3'-phosphate
  modified_base 16: mod_base = OTHER; note = 2'-O-methyl-adenosine-3'-phosphate
  modified_base 17: mod_base = OTHER; note = 2'-O-methyl-uridine-3'-phosphate
  modified_base 18: mod_base = OTHER; note = 2'-O-methyl-uridine-3'-phosphate
  modified_base 19: mod_base = OTHER; note = 2'-O-methyl-adenosine-3'-phosphate
aaatgaagtgtcattatta

SEQ ID NO: 1420 - RNA, 19 nt, synthetic construct
  source 1..19: mol_type = other RNA
  modified_base 1: mod_base = OTHER; note = 2'-O-methyl-adenosine-3'-phosphorothioate
  modified_base 2: mod_base = OTHER; note = 2'-O-methyl-adenosine-3'-phosphorothioate
  modified_base 3: mod_base = OTHER; note = 2'-O-methyl-uridine-3'-phosphate
  modified_base 4: mod_base = OTHER; note = 2'-O-methyl-guanosine-3'-phosphate
  modified_base 5: mod_base = OTHER; note = 2'-deoxy-2'-fluoro-adenosine-3'-phosphate
  modified_base 6: mod_base = OTHER; note = 2'-O-methyl-adenosine-3'-phosphate
  modified_base 7: mod_base = OTHER; note = 2'-deoxy-2'-fluoro-guanosine-3'-phosphate
  modified_base 8: mod_base = OTHER; note = 2'-deoxy-2'-fluoro-uridine-3'-phosphate
  modified_base 9: mod_base = OTHER; note = 2'-deoxy-2'-fluoro-guanosine-3'-phosphate
  modified_base 10: mod_base = OTHER; note = 2'-O-methyl-uridine-3'-phosphate
  modified_base 11: mod_base = OTHER; note = 2'-O-methyl-cytidine-3'-phosphate
  modified_base 12: mod_base = OTHER; note = 2'-O-methyl-adenosine-3'-phosphate
  modified_base 13: mod_base = OTHER; note = 2'-O-methyl-uridine-3'-phosphate
  modified_base 14: mod_base = OTHER; note = 2'-O-methyl-uridine-3'-phosphate
  modified_base 15: mod_base = OTHER; note = 2'-O-methyl-adenosine-3'-phosphate
  modified_base 16: mod_base = OTHER; note = 2'-O-methyl-uridine-3'-phosphate
  modified_base 17: mod_base = OTHER; note = 2'-O-methyl-uridine-3'-phosphate
  modified_base 18: mod_base = OTHER; note = 2'-O-methyl-cytidine-3'-phosphate
  modified_base 19: mod_base = OTHER; note = 2'-O-methyl-adenosine-3'-phosphate
aatgaagtgtcattattca

SEQ ID NO: 1421 - RNA, 19 nt, synthetic construct
  source 1..19: mol_type = other RNA
  modified_base 1: mod_base = OTHER; note = 2'-O-methyl-guanosine-3'-phosphorothioate
  modified_base 2: mod_base = OTHER; note = 2'-O-methyl-cytidine-3'-phosphorothioate
  modified_base 3: mod_base = OTHER; note = 2'-O-methyl-adenosine-3'-phosphate
  modified_base 4: mod_base = OTHER; note = 2'-O-methyl-cytidine-3'-phosphate
  modified_base 5: mod_base = OTHER; note = 2'-deoxy-2'-fluoro-guanosine-3'-phosphate
  modified_base 6: mod_base = OTHER; note = 2'-O-methyl-uridine-3'-phosphate
  modified_base 7: mod_base = OTHER; note = 2'-deoxy-2'-fluoro-cytidine-3'-phosphate
  modified_base 8: mod_base = OTHER; note = 2'-deoxy-2'-fluoro-adenosine-3'-phosphate
  modified_base 9: mod_base = OTHER; note = 2'-deoxy-2'-fluoro-adenosine-3'-phosphate
  modified_base 10: mod_base = OTHER; note = 2'-O-methyl-adenosine-3'-phosphate
  modified_base 11: mod_base = OTHER; note = 2'-O-methyl-adenosine-3'-phosphate
  modified_base 12: mod_base = OTHER; note = 2'-O-methyl-guanosine-3'-phosphate
  modified_base 13: mod_base = OTHER; note = 2'-O-methyl-cytidine-3'-phosphate
  modified_base 14: mod_base = OTHER; note = 2'-O-methyl-uridine-3'-phosphate
  modified_base 15: mod_base = OTHER; note = 2'-O-methyl-adenosine-3'-phosphate
  modified_base 16: mod_base = OTHER; note = 2'-O-methyl-cytidine-3'-phosphate
  modified_base 17: mod_base = OTHER; note = 2'-O-methyl-adenosine-3'-phosphate
  modified_base 18: mod_base = OTHER; note = 2'-O-methyl-guanosine-3'-phosphate
  modified_base 19: mod_base = OTHER; note = 2'-O-methyl-adenosine-3'-phosphate
gcacgtcaaaagctacaga

SEQ ID NO: 1422 - RNA, 19 nt, synthetic construct
  source 1..19: mol_type = other RNA
  modified_base 1: mod_base = OTHER; note = 2'-O-methyl-adenosine-3'-phosphorothioate
  modified_base 2: mod_base = OTHER; note = 2'-O-methyl-uridine-3'-phosphorothioate
  modified_base 3: mod_base = OTHER; note = 2'-O-methyl-cytidine-3'-phosphate
  modified_base 4: mod_base = OTHER; note = 2'-O-methyl-uridine-3'-phosphate
  modified_base 5: mod_base = OTHER; note = 2'-deoxy-2'-fluoro-guanosine-3'-phosphate
  modified_base 6: mod_base = OTHER; note = 2'-O-methyl-uridine-3'-phosphate
  modified_base 7: mod_base = OTHER; note = 2'-deoxy-2'-fluoro-uridine-3'-phosphate
  modified_base 8: mod_base = OTHER; note = 2'-deoxy-2'-fluoro-guanosine-3'-phosphate
  modified_base 9: mod_base = OTHER; note = 2'-deoxy-2'-fluoro-guanosine-3'-phosphate
  modified_base 10: mod_base = OTHER; note = 2'-O-methyl-adenosine-3'-phosphate
  modified_base 11: mod_base = OTHER; note = 2'-O-methyl-uridine-3'-phosphate
  modified_base 12: mod_base = OTHER; note = 2'-O-methyl-cytidine-3'-phosphate
  modified_base 13: mod_base = OTHER; note = 2'-O-methyl-uridine-3'-phosphate
  modified_base 14: mod_base = OTHER; note = 2'-O-methyl-uridine-3'-phosphate
  modified_base 15: mod_base = OTHER; note = 2'-O-methyl-guanosine-3'-phosphate
  modified_base 16: mod_base = OTHER; note = 2'-O-methyl-uridine-3'-phosphate
  modified_base 17: mod_base = OTHER; note = 2'-O-methyl-adenosine-3'-phosphate
  modified_base 18: mod_base = OTHER; note = 2'-O-methyl-adenosine-3'-phosphate
  modified_base 19: mod_base = OTHER; note = 2'-O-methyl-adenosine-3'-phosphate
atctgttggatcttgtaaa

SEQ ID NO: 1423 - RNA, 19 nt, synthetic construct
  source 1..19: mol_type = other RNA
  modified_base 1: mod_base = OTHER; note = 2'-O-methyl-uridine-3'-phosphorothioate
  modified_base 2: mod_base = OTHER; note = 2'-O-methyl-cytidine-3'-phosphorothioate
  modified_base 3: mod_base = OTHER; note = 2'-O-methyl-uridine-3'-phosphate
  modified_base 4: mod_base = OTHER; note = 2'-O-methyl-guanosine-3'-phosphate
  modified_base 5: mod_base = OTHER; note = 2'-deoxy-2'-fluoro-uridine-3'-phosphate
  modified_base 6: mod_base = OTHER; note = 2'-O-methyl-uridine-3'-phosphate
  modified_base 7: mod_base = OTHER; note = 2'-deoxy-2'-fluoro-guanosine-3'-phosphate
  modified_base 8: mod_base = OTHER; note = 2'-deoxy-2'-fluoro-guanosine-3'-phosphate
  modified_base 9: mod_base = OTHER; note = 2'-deoxy-2'-fluoro-adenosine-3'-phosphate
  modified_base 10: mod_base = OTHER; note = 2'-O-methyl-uridine-3'-phosphate
  modified_base 11: mod_base = OTHER; note = 2'-O-methyl-cytidine-3'-phosphate
  modified_base 12: mod_base = OTHER; note = 2'-O-methyl-uridine-3'-phosphate
  modified_base 13: mod_base = OTHER; note = 2'-O-methyl-uridine-3'-phosphate
  modified_base 14: mod_base = OTHER; note = 2'-O-methyl-guanosine-3'-phosphate
  modified_base 15: mod_base = OTHER; note = 2'-O-methyl-uridine-3'-phosphate
  modified_base 16: mod_base = OTHER; note = 2'-O-methyl-adenosine-3'-phosphate
  modified_base 17: mod_base = OTHER; note = 2'-O-methyl-adenosine-3'-phosphate
  modified_base 18: mod_base = OTHER; note = 2'-O-methyl-adenosine-3'-phosphate
  modified_base 19: mod_base = OTHER; note = 2'-O-methyl-adenosine-3'-phosphate
tctgttggatcttgtaaaa

SEQ ID NO: 1424 - RNA, 19 nt, synthetic construct
  source 1..19: mol_type = other RNA
  modified_base 1: mod_base = OTHER; note = 2'-O-methyl-cytidine-3'-phosphorothioate
  modified_base 2: mod_base = OTHER; note = 2'-O-methyl-uridine-3'-phosphorothioate
  modified_base 3: mod_base = OTHER; note = 2'-O-methyl-guanosine-3'-phosphate
  modified_base 4: mod_base = OTHER; note = 2'-O-methyl-uridine-3'-phosphate
  modified_base 5: mod_base = OTHER; note = 2'-deoxy-2'-fluoro-uridine-3'-phosphate
  modified_base 6: mod_base = OTHER; note = 2'-O-methyl-guanosine-3'-phosphate
  modified_base 7: mod_base = OTHER; note = 2'-deoxy-2'-fluoro-guanosine-3'-phosphate
  modified_base 8: mod_base = OTHER; note = 2'-deoxy-2'-fluoro-adenosine-3'-phosphate
  modified_base 9: mod_base = OTHER; note = 2'-deoxy-2'-fluoro-uridine-3'-phosphate
  modified_base 10: mod_base = OTHER; note = 2'-O-methyl-cytidine-3'-phosphate
  modified_base 11: mod_base = OTHER; note = 2'-O-methyl-uridine-3'-phosphate
  modified_base 12: mod_base = OTHER; note = 2'-O-methyl-uridine-3'-phosphate
  modified_base 13: mod_base = OTHER; note = 2'-O-methyl-guanosine-3'-phosphate
  modified_base 14: mod_base = OTHER; note = 2'-O-methyl-uridine-3'-phosphate
  modified_base 15: mod_base = OTHER; note = 2'-O-methyl-adenosine-3'-phosphate
  modified_base 16: mod_base = OTHER; note = 2'-O-methyl-adenosine-3'-phosphate
  modified_base 17: mod_base = OTHER; note = 2'-O-methyl-adenosine-3'-phosphate
  modified_base 18: mod_base = OTHER; note = 2'-O-methyl-cytidine-3'-phosphate
  modified_base 19: mod_base = OTHER; note = 2'-O-methyl-adenosine-3'-phosphate
ctgttggatcttgtaaaca

SEQ ID NO: 1425 - RNA, 19 nt, synthetic construct
  source 1..19: mol_type = other RNA
  modified_base 1: mod_base = OTHER; note = 2'-O-methyl-uridine-3'-phosphorothioate
  modified_base 2: mod_base = OTHER; note = 2'-O-methyl-guanosine-3'-phosphorothioate
  modified_base 3: mod_base = OTHER; note = 2'-O-methyl-uridine-3'-phosphate
  modified_base 4: mod_base = OTHER; note = 2'-O-methyl-uridine-3'-phosphate
  modified_base 5: mod_base = OTHER; note = 2'-deoxy-2'-fluoro-guanosine-3'-phosphate
  modified_base 6: mod_base = OTHER; note = 2'-O-methyl-guanosine-3'-phosphate
  modified_base 7: mod_base = OTHER; note = 2'-deoxy-2'-fluoro-adenosine-3'-phosphate
  modified_base 8: mod_base = OTHER; note = 2'-deoxy-2'-fluoro-uridine-3'-phosphate
  modified_base 9: mod_base = OTHER; note = 2'-deoxy-2'-fluoro-cytidine-3'-phosphate
  modified_base 10: mod_base = OTHER; note = 2'-O-methyl-uridine-3'-phosphate
  modified_base 11: mod_base = OTHER; note = 2'-O-methyl-uridine-3'-phosphate
  modified_base 12: mod_base = OTHER; note = 2'-O-methyl-guanosine-3'-phosphate
  modified_base 13: mod_base = OTHER; note = 2'-O-methyl-uridine-3'-phosphate
  modified_base 14: mod_base = OTHER; note = 2'-O-methyl-adenosine-3'-phosphate
  modified_base 15: mod_base = OTHER; note = 2'-O-methyl-adenosine-3'-phosphate
  modified_base 16: mod_base = OTHER; note = 2'-O-methyl-adenosine-3'-phosphate
  modified_base 17: mod_base = OTHER; note = 2'-O-methyl-cytidine-3'-phosphate
  modified_base 18: mod_base = OTHER; note = 2'-O-methyl-adenosine-3'-phosphate
  modified_base 19: mod_base = OTHER; note = 2'-O-methyl-adenosine-3'-phosphate
tgttggatcttgtaaacaa

SEQ ID NO: 1426 - RNA, 19 nt, synthetic construct
  source 1..19: mol_type = other RNA
  modified_base 1: mod_base = OTHER; note = 2'-O-methyl-guanosine-3'-phosphorothioate
  modified_base 2: mod_base = OTHER; note = 2'-O-methyl-uridine-3'-phosphorothioate
  modified_base 3: mod_base = OTHER; note = 2'-O-methyl-uridine-3'-phosphate
  modified_base 4: mod_base = OTHER; note = 2'-O-methyl-guanosine-3'-phosphate
  modified_base 5: mod_base = OTHER; note = 2'-deoxy-2'-fluoro-guanosine-3'-phosphate
  modified_base 6: mod_base = OTHER; note = 2'-O-methyl-adenosine-3'-phosphate
  modified_base 7: mod_base = OTHER; note = 2'-deoxy-2'-fluoro-uridine-3'-phosphate
  modified_base 8: mod_base = OTHER; note = 2'-deoxy-2'-fluoro-cytidine-3'-phosphate
  modified_base 9: mod_base = OTHER; note = 2'-deoxy-2'-fluoro-uridine-3'-phosphate
  modified_base 10: mod_base = OTHER; note = 2'-O-methyl-uridine-3'-phosphate
  modified_base 11: mod_base = OTHER; note = 2'-O-methyl-guanosine-3'-phosphate
  modified_base 12: mod_base = OTHER; note = 2'-O-methyl-uridine-3'-phosphate
  modified_base 13: mod_base = OTHER; note = 2'-O-methyl-adenosine-3'-phosphate
  modified_base 14: mod_base = OTHER; note = 2'-O-methyl-adenosine-3'-phosphate
  modified_base 15: mod_base = OTHER; note = 2'-O-methyl-adenosine-3'-phosphate
  modified_base 16: mod_base = OTHER; note = 2'-O-methyl-cytidine-3'-phosphate
  modified_base 17: mod_base = OTHER; note = 2'-O-methyl-adenosine-3'-phosphate
  modified_base 18: mod_base = OTHER; note = 2'-O-methyl-uridine-3'-phosphate
  modified_base 19: mod_base = OTHER; note = 2'-O-methyl-adenosine-3'-phosphate
gttggatcttgtaaacata

SEQ ID NO: 1427 - RNA, 19 nt, synthetic construct
  source 1..19: mol_type = other RNA
  modified_base 1: mod_base = OTHER; note = 2'-O-methyl-cytidine-3'-phosphorothioate
  modified_base 2: mod_base = OTHER; note = 2'-O-methyl-adenosine-3'-phosphorothioate
  modified_base 3: mod_base = OTHER; note = 2'-O-methyl-adenosine-3'-phosphate
  modified_base 4: mod_base = OTHER; note = 2'-O-methyl-cytidine-3'-phosphate
  modified_base 5: mod_base = OTHER; note = 2'-deoxy-2'-fluoro-uridine-3'-phosphate
  modified_base 6: mod_base = OTHER; note = 2'-O-methyl-guanosine-3'-phosphate
  modified_base 7: mod_base = OTHER; note = 2'-deoxy-2'-fluoro-uridine-3'-phosphate
  modified_base 8: mod_base = OTHER; note = 2'-deoxy-2'-fluoro-uridine-3'-phosphate
  modified_base 9: mod_base = OTHER; note = 2'-deoxy-2'-fluoro-guanosine-3'-phosphate
  modified_base 10: mod_base = OTHER; note = 2'-O-methyl-adenosine-3'-phosphate
  modified_base 11: mod_base = OTHER; note = 2'-O-methyl-uridine-3'-phosphate
  modified_base 12: mod_base = OTHER; note = 2'-O-methyl-uridine-3'-phosphate
  modified_base 13: mod_base = OTHER; note = 2'-O-methyl-uridine-3'-phosphate
  modified_base 14: mod_base = OTHER; note = 2'-O-methyl-cytidine-3'-phosphate
  modified_base 15: mod_base = OTHER; note = 2'-O-methyl-cytidine-3'-phosphate
  modified_base 16: mod_base = OTHER; note = 2'-O-methyl-uridine-3'-phosphate
  modified_base 17: mod_base = OTHER; note = 2'-O-methyl-cytidine-3'-phosphate
  modified_base 18: mod_base = OTHER; note = 2'-O-methyl-adenosine-3'-phosphate
  modified_base 19: mod_base = OTHER; note = 2'-O-methyl-adenosine-3'-phosphate
caactgttgatttcctcaa

SEQ ID NO: 1428 - RNA, 19 nt, synthetic construct
  source 1..19: mol_type = other RNA
  modified_base 1: mod_base = OTHER; note = 2'-O-methyl-adenosine-3'-phosphorothioate
  modified_base 2: mod_base = OTHER; note = 2'-O-methyl-adenosine-3'-phosphorothioate
  modified_base 3: mod_base = OTHER; note = 2'-O-methyl-cytidine-3'-phosphate
  modified_base 4: mod_base = OTHER; note = 2'-O-methyl-adenosine-3'-phosphate
  modified_base 5: mod_base = OTHER; note = 2'-deoxy-2'-fluoro-uridine-3'-phosphate
  modified_base 6: mod_base = OTHER; note = 2'-O-methyl-guanosine-3'-phosphate
  modified_base 7: mod_base = OTHER; note = 2'-deoxy-2'-fluoro-guanosine-3'-phosphate
  modified_base 8: mod_base = OTHER; note = 2'-deoxy-2'-fluoro-cytidine-3'-phosphate
  modified_base 9: mod_base = OTHER; note = 2'-deoxy-2'-fluoro-uridine-3'-phosphate
  modified_base 10: mod_base = OTHER; note = 2'-O-methyl-cytidine-3'-phosphate
  modified_base 11: mod_base = OTHER; note = 2'-O-methyl-adenosine-3'-phosphate
  modified_base 12: mod_base = OTHER; note = 2'-O-methyl-cytidine-3'-phosphate
  modified_base 13: mod_base = OTHER; note = 2'-O-methyl-adenosine-3'-phosphate
  modified_base 14: mod_base = OTHER; note = 2'-O-methyl-adenosine-3'-phosphate
  modified_base 15: mod_base = OTHER; note = 2'-O-methyl-adenosine-3'-phosphate
  modified_base 16: mod_base = OTHER; note = 2'-O-methyl-uridine-3'-phosphate
  modified_base 17: mod_base = OTHER; note = 2'-O-methyl-uridine-3'-phosphate
  modified_base 18: mod_base = OTHER; note = 2'-O-methyl-uridine-3'-phosphate
  modified_base 19: mod_base = OTHER; note = 2'-O-methyl-adenosine-3'-phosphate
aacatggctcacaaattta

SEQ ID NO: 1429 - RNA, 19 nt, synthetic construct
  source 1..19: mol_type = other RNA
  modified_base 1: mod_base = OTHER; note = 2'-O-methyl-uridine-3'-phosphorothioate
  modified_base 2: mod_base = OTHER; note = 2'-O-methyl-cytidine-3'-phosphorothioate
  modified_base 3: mod_base = OTHER; note = 2'-O-methyl-adenosine-3'-phosphate
  modified_base 4: mod_base = OTHER; note = 2'-O-methyl-cytidine-3'-phosphate
  modified_base 5: mod_base = OTHER; note = 2'-deoxy-2'-fluoro-adenosine-3'-phosphate
  modified_base 6: mod_base = OTHER; note = 2'-O-methyl-adenosine-3'-phosphate
  modified_base 7: mod_base = OTHER; note = 2'-deoxy-2'-fluoro-adenosine-3'-phosphate
  modified_base 8: mod_base = OTHER; note = 2'-deoxy-2'-fluoro-uridine-3'-phosphate
  modified_base 9: mod_base = OTHER; note = 2'-deoxy-2'-fluoro-uridine-3'-phosphate
  modified_base 10: mod_base = OTHER; note = 2'-O-methyl-uridine-3'-phosphate
  modified_base 11: mod_base = OTHER; note = 2'-O-methyl-cytidine-3'-phosphate
  modified_base 12: mod_base = OTHER; note = 2'-O-methyl-uridine-3'-phosphate
  modified_base 13: mod_base = OTHER; note = 2'-O-methyl-adenosine-3'-phosphate
  modified_base 14: mod_base = OTHER; note = 2'-O-methyl-uridine-3'-phosphate
  modified_base 15: mod_base = OTHER; note = 2'-O-methyl-cytidine-3'-phosphate
  modified_base 16: mod_base = OTHER; note = 2'-O-methyl-cytidine-3'-phosphate
  modified_base 17: mod_base = OTHER; note = 2'-O-methyl-cytidine-3'-phosphate
  modified_base 18: mod_base = OTHER; note = 2'-O-methyl-adenosine-3'-phosphate
  modified_base 19: mod_base = OTHER; note = 2'-O-methyl-adenosine-3'-phosphate
tcacaaatttctatcccaa

SEQ ID NO: 1430 - RNA, 19 nt, synthetic construct
  source 1..19: mol_type = other RNA
  modified_base 1: mod_base = OTHER; note = 2'-O-methyl-adenosine-3'-phosphorothioate
  modified_base 2: mod_base = OTHER; note = 2'-O-methyl-adenosine-3'-phosphorothioate
  modified_base 3: mod_base = OTHER; note = 2'-O-methyl-uridine-3'-phosphate
  modified_base 4: mod_base = OTHER; note = 2'-O-methyl-uridine-3'-phosphate
  modified_base 5: mod_base = OTHER; note = 2'-deoxy-2'-fluoro-uridine-3'-phosphate
  modified_base 6: mod_base = OTHER; note = 2'-O-methyl-cytidine-3'-phosphate
  modified_base 7: mod_base = OTHER; note = 2'-deoxy-2'-fluoro-uridine-3'-phosphate
  modified_base 8: mod_base = OTHER; note = 2'-deoxy-2'-fluoro-adenosine-3'-phosphate
  modified_base 9: mod_base = OTHER; note = 2'-deoxy-2'-fluoro-uridine-3'-phosphate
  modified_base 10: mod_base = OTHER; note = 2'-O-methyl-cytidine-3'-phosphate
  modified_base 11: mod_base = OTHER; note = 2'-O-methyl-cytidine-3'-phosphate
  modified_base 12: mod_base = OTHER; note = 2'-O-methyl-cytidine-3'-phosphate
  modified_base 13: mod_base = OTHER; note = 2'-O-methyl-adenosine-3'-phosphate
  modified_base 14: mod_base = OTHER; note = 2'-O-methyl-adenosine-3'-phosphate
  modified_base 15: mod_base = OTHER; note = 2'-O-methyl-adenosine-3'-phosphate
  modified_base 16: mod_base = OTHER; note = 2'-O-methyl-uridine-3'-phosphate
  modified_base 17: mod_base = OTHER; note = 2'-O-methyl-cytidine-3'-phosphate
  modified_base 18: mod_base = OTHER; note = 2'-O-methyl-uridine-3'-phosphate
  modified_base 19: mod_base = OTHER; note = 2'-O-methyl-adenosine-3'-phosphate
aatttctatcccaaatcta

SEQ ID NO: 1431 - RNA, 19 nt, synthetic construct
  source 1..19: mol_type = other RNA
  modified_base 1: mod_base = OTHER; note = 2'-O-methyl-adenosine-3'-phosphorothioate
  modified_base 2: mod_base = OTHER; note = 2'-O-methyl-uridine-3'-phosphorothioate
  modified_base 3: mod_base = OTHER; note = 2'-O-methyl-uridine-3'-phosphate
  modified_base 4: mod_base = OTHER; note = 2'-O-methyl-uridine-3'-phosphate
  modified_base 5: mod_base = OTHER; note = 2'-deoxy-2'-fluoro-cytidine-3'-phosphate
  modified_base 6: mod_base = OTHER; note = 2'-O-methyl-uridine-3'-phosphate
  modified_base 7: mod_base = OTHER; note = 2'-deoxy-2'-fluoro-adenosine-3'-phosphate
  modified_base 8: mod_base = OTHER; note = 2'-deoxy-2'-fluoro-uridine-3'-phosphate
  modified_base 9: mod_base = OTHER; note = 2'-deoxy-2'-fluoro-cytidine-3'-phosphate
  modified_base 10: mod_base = OTHER; note = 2'-O-methyl-cytidine-3'-phosphate
  modified_base 11: mod_base = OTHER; note = 2'-O-methyl-cytidine-3'-phosphate
  modified_base 12: mod_base = OTHER; note = 2'-O-methyl-adenosine-3'-phosphate
  modified_base 13: mod_base = OTHER; note = 2'-O-methyl-adenosine-3'-phosphate
  modified_base 14: mod_base = OTHER; note = 2'-O-methyl-adenosine-3'-phosphate
  modified_base 15: mod_base = OTHER; note = 2'-O-methyl-uridine-3'-phosphate
  modified_base 16: mod_base = OTHER; note = 2'-O-methyl-cytidine-3'-phosphate
  modified_base 17: mod_base = OTHER; note = 2'-O-methyl-uridine-3'-phosphate
  modified_base 18: mod_base = OTHER; note = 2'-O-methyl-uridine-3'-phosphate
  modified_base 19: mod_base = OTHER; note = 2'-O-methyl-adenosine-3'-phosphate
atttctatcccaaatctta

SEQ ID NO: 1432 - RNA, 19 nt, synthetic construct
  source 1..19: mol_type = other RNA
  modified_base 1: mod_base = OTHER; note = 2'-O-methyl-cytidine-3'-phosphorothioate
  modified_base 2: mod_base = OTHER; note = 2'-O-methyl-uridine-3'-phosphorothioate
  modified_base 3: mod_base = OTHER; note = 2'-O-methyl-uridine-3'-phosphate
  modified_base 4: mod_base = OTHER; note = 2'-O-methyl-uridine-3'-phosphate
  modified_base 5: mod_base = OTHER; note = 2'-deoxy-2'-fluoro-uridine-3'-phosphate
  modified_base 6: mod_base = OTHER; note = 2'-O-methyl-guanosine-3'-phosphate
  modified_base 7: mod_base = OTHER; note = 2'-deoxy-2'-fluoro-adenosine-3'-phosphate
  modified_base 8: mod_base = OTHER; note = 2'-deoxy-2'-fluoro-guanosine-3'-phosphate
  modified_base 9: mod_base = OTHER; note = 2'-deoxy-2'-fluoro-guanosine-3'-phosphate
  modified_base 10: mod_base = OTHER; note = 2'-O-methyl-uridine-3'-phosphate
  modified_base 11: mod_base = OTHER; note = 2'-O-methyl-guanosine-3'-phosphate
  modified_base 12: mod_base = OTHER; note = 2'-O-methyl-adenosine-3'-phosphate
  modified_base 13: mod_base = OTHER; note = 2'-O-methyl-adenosine-3'-phosphate
  modified_base 14: mod_base = OTHER; note = 2'-O-methyl-uridine-3'-phosphate
  modified_base 15: mod_base = OTHER; note = 2'-O-methyl-adenosine-3'-phosphate
  modified_base 16: mod_base = OTHER; note = 2'-O-methyl-uridine-3'-phosphate
  modified_base 17: mod_base = OTHER; note = 2'-O-methyl-adenosine-3'-phosphate
  modified_base 18: mod_base = OTHER; note = 2'-O-methyl-adenosine-3'-phosphate
  modified_base 19: mod_base = OTHER; note = 2'-O-methyl-adenosine-3'-phosphate
cttttgaggtgaatataaa

SEQ ID NO: 1433 - RNA, 19 nt, synthetic construct
  source 1..19: mol_type = other RNA
  modified_base 1: mod_base = OTHER; note = 2'-O-methyl-uridine-3'-phosphorothioate
  modified_base 2: mod_base = OTHER; note = 2'-O-methyl-uridine-3'-phosphorothioate
  modified_base 3: mod_base = OTHER; note = 2'-O-methyl-uridine-3'-phosphate
  modified_base 4: mod_base = OTHER; note = 2'-O-methyl-cytidine-3'-phosphate
  modified_base 5: mod_base = OTHER; note = 2'-deoxy-2'-fluoro-adenosine-3'-phosphate
  modified_base 6: mod_base = OTHER; note = 2'-O-methyl-guanosine-3'-phosphate
  modified_base 7: mod_base = OTHER; note = 2'-deoxy-2'-fluoro-guanosine-3'-phosphate
  modified_base 8: mod_base = OTHER; note = 2'-deoxy-2'-fluoro-uridine-3'-phosphate
  modified_base 9: mod_base = OTHER; note = 2'-deoxy-2'-fluoro-cytidine-3'-phosphate
  modified_base 10: mod_base = OTHER; note = 2'-O-methyl-uridine-3'-phosphate
  modified_base 11: mod_base = OTHER; note = 2'-O-methyl-uridine-3'-phosphate
  modified_base 12: mod_base = OTHER; note = 2'-O-methyl-cytidine-3'-phosphate
  modified_base 13: mod_base = OTHER; note = 2'-O-methyl-adenosine-3'-phosphate
  modified_base 14: mod_base = OTHER; note = 2'-O-methyl-cytidine-3'-phosphate
  modified_base 15: mod_base = OTHER; note = 2'-O-methyl-cytidine-3'-phosphate
  modified_base 16: mod_base = OTHER; note = 2'-O-methyl-adenosine-3'-phosphate
  modified_base 17: mod_base = OTHER; note = 2'-O-methyl-adenosine-3'-phosphate
  modified_base 18: mod_base = OTHER; note = 2'-O-methyl-guanosine-3'-phosphate
  modified_base 19: mod_base = OTHER; note = 2'-O-methyl-adenosine-3'-phosphate
tttcaggtcttcaccaaga

SEQ ID NO: 1434 - RNA, 19 nt, synthetic construct
  source 1..19: mol_type = other RNA
  modified_base 1: mod_base = OTHER; note = 2'-O-methyl-uridine-3'-phosphorothioate
  modified_base 2: mod_base = OTHER; note = 2'-O-methyl-uridine-3'-phosphorothioate
  modified_base 3: mod_base = OTHER; note = 2'-O-methyl-cytidine-3'-phosphate
  modified_base 4: mod_base = OTHER; note = 2'-O-methyl-adenosine-3'-phosphate
  modified_base 5: mod_base = OTHER; note = 2'-deoxy-2'-fluoro-guanosine-3'-phosphate
  modified_base 6: mod_base = OTHER; note = 2'-O-methyl-guanosine-3'-phosphate
  modified_base 7: mod_base = OTHER; note = 2'-deoxy-2'-fluoro-uridine-3'-phosphate
  modified_base 8: mod_base = OTHER; note = 2'-deoxy-2'-fluoro-cytidine-3'-phosphate
  modified_base 9: mod_base = OTHER; note = 2'-deoxy-2'-fluoro-uridine-3'-phosphate
  modified_base 10: mod_base = OTHER; note = 2'-O-methyl-uridine-3'-phosphate
  modified_base 11: mod_base = OTHER; note = 2'-O-methyl-cytidine-3'-phosphate
  modified_base 12: mod_base = OTHER; note = 2'-O-methyl-adenosine-3'-phosphate
  modified_base 13: mod_base = OTHER; note = 2'-O-methyl-cytidine-3'-phosphate
  modified_base 14: mod_base = OTHER; note = 2'-O-methyl-cytidine-3'-phosphate
  modified_base 15: mod_base = OTHER; note = 2'-O-methyl-adenosine-3'-phosphate
  modified_base 16: mod_base = OTHER; note = 2'-O-methyl-adenosine-3'-phosphate
  modified_base 17: mod_base = OTHER; note = 2'-O-methyl-guanosine-3'-phosphate
  modified_base 18: mod_base = OTHER; note = 2'-O-methyl-uridine-3'-phosphate
  modified_base 19: mod_base = OTHER; note = 2'-O-methyl-adenosine-3'-phosphate
ttcaggtcttcaccaagta

SEQ ID NO: 1435 - RNA, 19 nt, synthetic construct
  source 1..19: mol_type = other RNA
  modified_base 1: mod_base = OTHER; note = 2'-O-methyl-uridine-3'-phosphorothioate
  modified_base 2: mod_base = OTHER; note = 2'-O-methyl-cytidine-3'-phosphorothioate
  modified_base 3: mod_base = OTHER; note = 2'-O-methyl-adenosine-3'-phosphate
  modified_base 4: mod_base = OTHER; note = 2'-O-methyl-guanosine-3'-phosphate
  modified_base 5: mod_base = OTHER; note = 2'-deoxy-2'-fluoro-guanosine-3'-phosphate
  modified_base 6: mod_base = OTHER; note = 2'-O-methyl-uridine-3'-phosphate
  modified_base 7: mod_base = OTHER; note = 2'-deoxy-2'-fluoro-cytidine-3'-phosphate
  modified_base 8: mod_base = OTHER; note = 2'-deoxy-2'-fluoro-uridine-3'-phosphate
  modified_base 9: mod_base = OTHER; note = 2'-deoxy-2'-fluoro-uridine-3'-phosphate
  modified_base 10: mod_base = OTHER; note = 2'-O-methyl-cytidine-3'-phosphate
  modified_base 11: mod_base = OTHER; note = 2'-O-methyl-adenosine-3'-phosphate
  modified_base 12: mod_base = OTHER; note = 2'-O-methyl-cytidine-3'-phosphate
  modified_base 13: mod_base = OTHER; note = 2'-O-methyl-cytidine-3'-phosphate
  modified_base 14: mod_base = OTHER; note = 2'-O-methyl-adenosine-3'-phosphate
  modified_base 15: mod_base = OTHER; note = 2'-O-methyl-adenosine-3'-phosphate
  modified_base 16: mod_base = OTHER; note = 2'-O-methyl-guanosine-3'-phosphate
  modified_base 17: mod_base = OTHER; note = 2'-O-methyl-uridine-3'-phosphate
  modified_base 18: mod_base = OTHER; note = 2'-O-methyl-adenosine-3'-phosphate
  modified_base 19: mod_base = OTHER; note = 2'-O-methyl-adenosine-3'-phosphate
tcaggtcttcaccaagtaa

SEQ ID NO: 1436 - RNA, 19 nt, synthetic construct
  source 1..19: mol_type = other RNA
  modified_base 1: mod_base = OTHER; note = 2'-O-methyl-cytidine-3'-phosphorothioate
  modified_base 2: mod_base = OTHER; note = 2'-O-methyl-adenosine-3'-phosphorothioate
  modified_base 3: mod_base = OTHER; note = 2'-O-methyl-guanosine-3'-phosphate
  modified_base 4: mod_base = OTHER; note = 2'-O-methyl-guanosine-3'-phosphate
  modified_base 5: mod_base = OTHER; note = 2'-deoxy-2'-fluoro-uridine-3'-phosphate
  modified_base 6: mod_base = OTHER; note = 2'-O-methyl-cytidine-3'-phosphate
  modified_base 7: mod_base = OTHER; note = 2'-deoxy-2'-fluoro-uridine-3'-phosphate
  modified_base 8: mod_base = OTHER; note = 2'-deoxy-2'-fluoro-uridine-3'-phosphate
  modified_base 9: mod_base = OTHER; note = 2'-deoxy-2'-fluoro-cytidine-3'-phosphate
  modified_base 10: mod_base = OTHER; note = 2'-O-methyl-adenosine-3'-phosphate
  modified_base 11: mod_base = OTHER; note = 2'-O-methyl-cytidine-3'-phosphate
  modified_base 12: mod_base = OTHER; note = 2'-O-methyl-cytidine-3'-phosphate
  modified_base 13: mod_base = OTHER; note = 2'-O-methyl-adenosine-3'-phosphate
  modified_base 14: mod_base = OTHER; note = 2'-O-methyl-adenosine-3'-phosphate
  modified_base 15: mod_base = OTHER; note = 2'-O-methyl-guanosine-3'-phosphate
  modified_base 16: mod_base = OTHER; note = 2'-O-methyl-uridine-3'-phosphate
  modified_base 17: mod_base = OTHER; note = 2'-O-methyl-adenosine-3'-phosphate
  modified_base 18: mod_base = OTHER; note = 2'-O-methyl-uridine-3'-phosphate
  modified_base 19: mod_base = OTHER; note = 2'-O-methyl-adenosine-3'-phosphate
caggtcttcaccaagtata

SEQ ID NO: 1437 - RNA, 19 nt, synthetic construct
  source 1..19: mol_type = other RNA
  modified_base 1: mod_base = OTHER; note = 2'-O-methyl-adenosine-3'-phosphorothioate
  modified_base 2: mod_base = OTHER; note = 2'-O-methyl-guanosine-3'-phosphorothioate
  modified_base 3: mod_base = OTHER; note = 2'-O-methyl-guanosine-3'-phosphate
  modified_base 4: mod_base = OTHER; note = 2'-O-methyl-uridine-3'-phosphate
  modified_base 5: mod_base = OTHER; note = 2'-deoxy-2'-fluoro-cytidine-3'-phosphate
  modified_base 6: mod_base = OTHER; note = 2'-O-methyl-uridine-3'-phosphate
  modified_base 7: mod_base = OTHER; note = 2'-deoxy-2'-fluoro-uridine-3'-phosphate
  modified_base 8: mod_base = OTHER; note = 2'-deoxy-2'-fluoro-cytidine-3'-phosphate
  modified_base 9: mod_base = OTHER; note = 2'-deoxy-2'-fluoro-adenosine-3'-phosphate
  modified_base 10: mod_base = OTHER; note = 2'-O-methyl-cytidine-3'-phosphate
  modified_base 11: mod_base = OTHER; note = 2'-O-methyl-cytidine-3'-phosphate
  modified_base 12: mod_base = OTHER; note = 2'-O-methyl-adenosine-3'-phosphate
  modified_base 13: mod_base = OTHER; note = 2'-O-methyl-adenosine-3'-phosphate
  modified_base 14: mod_base = OTHER; note = 2'-O-methyl-guanosine-3'-phosphate
  modified_base 15: mod_base = OTHER; note = 2'-O-methyl-uridine-3'-phosphate
  modified_base 16: mod_base = OTHER; note = 2'-O-methyl-adenosine-3'-phosphate
  modified_base 17: mod_base = OTHER; note = 2'-O-methyl-uridine-3'-phosphate
  modified_base 18: mod_base = OTHER; note = 2'-O-methyl-cytidine-3'-phosphate
  modified_base 19: mod_base = OTHER; note = 2'-O-methyl-adenosine-3'-phosphate
aggtcttcaccaagtatca

SEQ ID NO: 1438 - RNA, 19 nt, synthetic construct
  source 1..19: mol_type = other RNA
  modified_base 1: mod_base = OTHER; note = 2'-O-methyl-adenosine-3'-phosphorothioate
  modified_base 2: mod_base = OTHER; note = 2'-O-methyl-uridine-3'-phosphorothioate
  modified_base 3: mod_base = OTHER; note = 2'-O-methyl-guanosine-3'-phosphate
  modified_base 4: mod_base = OTHER; note = 2'-O-methyl-adenosine-3'-phosphate
  modified_base 5: mod_base = OTHER; note = 2'-deoxy-2'-fluoro-adenosine-3'-phosphate
  modified_base 6: mod_base = OTHER; note = 2'-O-methyl-guanosine-3'-phosphate
  modified_base 7: mod_base = OTHER; note = 2'-deoxy-2'-fluoro-uridine-3'-phosphate
  modified_base 8: mod_base = OTHER; note = 2'-deoxy-2'-fluoro-guanosine-3'-phosphate
  modified_base 9: mod_base = OTHER; note = 2'-deoxy-2'-fluoro-uridine-3'-phosphate
  modified_base 10: mod_base = OTHER; note = 2'-O-methyl-cytidine-3'-phosphate
  modified_base 11: mod_base = OTHER; note = 2'-O-methyl-adenosine-3'-phosphate
  modified_base 12: mod_base = OTHER; note = 2'-O-methyl-uridine-3'-phosphate
  modified_base 13: mod_base = OTHER; note = 2'-O-methyl-uridine-3'-phosphate
  modified_base 14: mod_base = OTHER; note = 2'-O-methyl-adenosine-3'-phosphate
  modified_base 15: mod_base = OTHER; note = 2'-O-methyl-uridine-3'-phosphate
  modified_base 16: mod_base = OTHER; note = 2'-O-methyl-uridine-3'-phosphate
  modified_base 17: mod_base = OTHER; note = 2'-O-methyl-cytidine-3'-phosphate
  modified_base 18: mod_base = OTHER; note = 2'-O-methyl-adenosine-3'-phosphate
  modified_base 19: mod_base = OTHER; note = 2'-O-methyl-adenosine-3'-phosphate
atgaagtgtcattattcaa

SEQ ID NO: 1439 - RNA, 19 nt, synthetic construct
  source 1..19: mol_type = other RNA
  modified_base 1: mod_base = OTHER; note = 2'-O-methyl-cytidine-3'-phosphorothioate
  modified_base 2: mod_base = OTHER; note = 2'-O-methyl-adenosine-3'-phosphorothioate
  modified_base 3: mod_base = OTHER; note = 2'-O-methyl-cytidine-3'-phosphate
  modified_base 4: mod_base = OTHER; note = 2'-O-methyl-uridine-3'-phosphate
  modified_base 5: mod_base = OTHER; note = 2'-deoxy-2'-fluoro-guanosine-3'-phosphate
  modified_base 6: mod_base = OTHER; note = 2'-O-methyl-adenosine-3'-phosphate
  modified_base 7: mod_base = OTHER; note = 2'-deoxy-2'-fluoro-cytidine-3'-phosphate
  modified_base 8: mod_base = OTHER; note = 2'-deoxy-2'-fluoro-uridine-3'-phosphate
  modified_base 9: mod_base = OTHER; note = 2'-deoxy-2'-fluoro-cytidine-3'-phosphate
  modified_base 10: mod_base = OTHER; note = 2'-O-methyl-cytidine-3'-phosphate
  modified_base 11: mod_base = OTHER; note = 2'-O-methyl-uridine-3'-phosphate
  modified_base 12: mod_base = OTHER; note = 2'-O-methyl-cytidine-3'-phosphate
  modified_base 13: mod_base = OTHER; note = 2'-O-methyl-adenosine-3'-phosphate
  modified_base 14: mod_base = OTHER; note = 2'-O-methyl-cytidine-3'-phosphate
  modified_base 15: mod_base = OTHER; note = 2'-O-methyl-adenosine-3'-phosphate
  modified_base 16: mod_base = OTHER; note = 2'-O-methyl-uridine-3'-phosphate
  modified_base 17: mod_base = OTHER; note = 2'-O-methyl-cytidine-3'-phosphate
  modified_base 18: mod_base = OTHER; note = 2'-O-methyl-uridine-3'-phosphate
  modified_base 19: mod_base = OTHER; note = 2'-O-methyl-adenosine-3'-phosphate
cactgactcctcacatcta

SEQ ID NO: 1440 - RNA, 19 nt, synthetic construct
  source 1..19: mol_type = other RNA
  modified_base 1: mod_base = OTHER; note = 2'-O-methyl-uridine-3'-phosphorothioate
  modified_base 2: mod_base = OTHER; note = 2'-O-methyl-uridine-3'-phosphorothioate
  modified_base 3: mod_base = OTHER; note = 2'-O-methyl-uridine-3'-phosphate
  modified_base 4: mod_base = OTHER; note = 2'-O-methyl-cytidine-3'-phosphate
  modified_base 5: mod_base = OTHER; note = 2'-deoxy-2'-fluoro-uridine-3'-phosphate
  modified_base 6: mod_base = OTHER; note = 2'-O-methyl-adenosine-3'-phosphate
  modified_base 7: mod_base = OTHER; note = 2'-deoxy-2'-fluoro-uridine-3'-phosphate
  modified_base 8: mod_base = OTHER; note = 2'-deoxy-2'-fluoro-guanosine-3'-phosphate
  modified_base 9: mod_base = OTHER; note = 2'-deoxy-2'-fluoro-cytidine-3'-phosphate
  modified_base 10: mod_base = OTHER; note = 2'-O-methyl-cytidine-3'-phosphate
  modified_base 11: mod_base = OTHER; note = 2'-O-methyl-adenosine-3'-phosphate
  modified_base 12: mod_base = OTHER; note = 2'-O-methyl-cytidine-3'-phosphate
  modified_base 13: mod_base = OTHER; note = 2'-O-methyl-adenosine-3'-phosphate
  modified_base 14: mod_base = OTHER; note = 2'-O-methyl-uridine-3'-phosphate
  modified_base 15: mod_base = OTHER; note = 2'-O-methyl-uridine-3'-phosphate
  modified_base 16: mod_base = OTHER; note = 2'-O-methyl-adenosine-3'-phosphate
  modified_base 17: mod_base = OTHER; note = 2'-O-methyl-adenosine-3'-phosphate
  modified_base 18: mod_base = OTHER; note = 2'-O-methyl-cytidine-3'-phosphate
  modified_base 19: mod_base = OTHER; note = 2'-O-methyl-adenosine-3'-phosphate
tttctatgccacattaaca

SEQ ID NO: 1441 - RNA, 19 nt, synthetic construct
  source 1..19: mol_type = other RNA
  modified_base 1: mod_base = OTHER; note = 2'-O-methyl-guanosine-3'-phosphorothioate
  modified_base 2: mod_base = OTHER; note = 2'-O-methyl-adenosine-3'-phosphorothioate
  modified_base 3: mod_base = OTHER; note = 2'-O-methyl-cytidine-3'-phosphate
  modified_base 4: mod_base = OTHER; note = 2'-O-methyl-uridine-3'-phosphate
  modified_base 5: mod_base = OTHER; note = 2'-deoxy-2'-fluoro-uridine-3'-phosphate
  modified_base 6: mod_base = OTHER; note = 2'-O-methyl-cytidine-3'-phosphate
  modified_base 7: mod_base = OTHER; note = 2'-deoxy-2'-fluoro-adenosine-3'-phosphate
  modified_base 8: mod_base = OTHER; note = 2'-deoxy-2'-fluoro-uridine-3'-phosphate
  modified_base 9: mod_base = OTHER; note = 2'-deoxy-2'-fluoro-adenosine-3'-phosphate
  modified_base 10: mod_base = OTHER; note = 2'-O-methyl-cytidine-3'-phosphate
  modified_base 11: mod_base = OTHER; note = 2'-O-methyl-adenosine-3'-phosphate
  modified_base 12: mod_base = OTHER; note = 2'-O-methyl-adenosine-3'-phosphate
  modified_base 13: mod_base = OTHER; note = 2'-O-methyl-cytidine-3'-phosphate
  modified_base 14: mod_base = OTHER; note = 2'-O-methyl-adenosine-3'-phosphate
  modified_base 15: mod_base = OTHER; note = 2'-O-methyl-cytidine-3'-phosphate
  modified_base 16: mod_base = OTHER; note = 2'-O-methyl-adenosine-3'-phosphate
  modified_base 17: mod_base = OTHER; note = 2'-O-methyl-adenosine-3'-phosphate
  modified_base 18: mod_base = OTHER; note = 2'-O-methyl-uridine-3'-phosphate
  modified_base 19: mod_base = OTHER; note = 2'-O-methyl-adenosine-3'-phosphate
gacttcatacaacacaata

SEQ ID NO: 1442 - RNA, 19 nt, synthetic construct
  source 1..19: mol_type = other RNA
  modified_base 1: mod_base = OTHER; note = 2'-O-methyl-cytidine-3'-phosphorothioate
  modified_base 2: mod_base = OTHER; note = 2'-O-methyl-adenosine-3'-phosphorothioate
  modified_base 3: mod_base = OTHER; note = 2'-O-methyl-uridine-3'-phosphate
  modified_base 4: mod_base = OTHER; note = 2'-O-methyl-adenosine-3'-phosphate
  modified_base 5: mod_base = OTHER; note = 2'-deoxy-2'-fluoro-cytidine-3'-phosphate
  modified_base 6: mod_base = OTHER; note = 2'-O-methyl-adenosine-3'-phosphate
  modified_base 7: mod_base = OTHER; note = 2'-deoxy-2'-fluoro-adenosine-3'-phosphate
  modified_base 8: mod_base = OTHER; note = 2'-deoxy-2'-fluoro-cytidine-3'-phosphate
  modified_base 9: mod_base = OTHER; note = 2'-deoxy-2'-fluoro-adenosine-3'-phosphate
  modified_base 10: mod_base = OTHER; note = 2'-O-methyl-cytidine-3'-phosphate
  modified_base 11: mod_base = OTHER; note = 2'-O-methyl-adenosine-3'-phosphate
  modified_base 12: mod_base = OTHER; note = 2'-O-methyl-adenosine-3'-phosphate
  modified_base 13: mod_base = OTHER; note = 2'-O-methyl-uridine-3'-phosphate
  modified_base 14: mod_base = OTHER; note = 2'-O-methyl-adenosine-3'-phosphate
  modified_base 15: mod_base = OTHER; note = 2'-O-methyl-cytidine-3'-phosphate
  modified_base 16: mod_base = OTHER; note = 2'-O-methyl-uridine-3'-phosphate
  modified_base 17: mod_base = OTHER; note = 2'-O-methyl-cytidine-3'-phosphate
  modified_base 18: mod_base = OTHER; note = 2'-O-methyl-uridine-3'-phosphate
  modified_base 19: mod_base = OTHER; note = 2'-O-methyl-adenosine-3'-phosphate
catacaacacaatactcta

SEQ ID NO: 1443 - RNA, 19 nt, synthetic construct
  source 1..19: mol_type = other RNA
  modified_base 1: mod_base = OTHER; note = 2'-O-methyl-adenosine-3'-phosphorothioate
  modified_base 2: mod_base = OTHER; note = 2'-O-methyl-uridine-3'-phosphorothioate
  modified_base 3: mod_base = OTHER; note = 2'-O-methyl-adenosine-3'-phosphate
  modified_base 4: mod_base = OTHER; note = 2'-O-methyl-cytidine-3'-phosphate
  modified_base 5: mod_base = OTHER; note = 2'-deoxy-2'-fluoro-adenosine-3'-phosphate
  modified_base 6: mod_base = OTHER; note = 2'-O-methyl-adenosine-3'-phosphate
  modified_base 7: mod_base = OTHER; note = 2'-deoxy-2'-fluoro-cytidine-3'-phosphate
  modified_base 8: mod_base = OTHER; note = 2'-deoxy-2'-fluoro-adenosine-3'-phosphate
  modified_base 9: mod_base = OTHER; note = 2'-deoxy-2'-fluoro-cytidine-3'-phosphate
  modified_base 10: mod_base = OTHER; note = 2'-O-methyl-adenosine-3'-phosphate
  modified_base 11: mod_base = OTHER; note = 2'-O-methyl-adenosine-3'-phosphate
  modified_base 12: mod_base = OTHER; note = 2'-O-methyl-uridine-3'-phosphate
  modified_base 13: mod_base = OTHER; note = 2'-O-methyl-adenosine-3'-phosphate
  modified_base 14: mod_base = OTHER; note = 2'-O-methyl-cytidine-3'-phosphate
  modified_base 15: mod_base = OTHER; note = 2'-O-methyl-uridine-3'-phosphate
  modified_base 16: mod_base = OTHER; note = 2'-O-methyl-cytidine-3'-phosphate
  modified_base 17: mod_base = OTHER; note = 2'-O-methyl-uridine-3'-phosphate
  modified_base 18: mod_base = OTHER; note = 2'-O-methyl-adenosine-3'-phosphate
  modified_base 19: mod_base = OTHER; note = 2'-O-methyl-adenosine-3'-phosphate
atacaacacaatactctaa

SEQ ID NO: 1444 - RNA, 19 nt, synthetic construct
  source 1..19: mol_type = other RNA
  modified_base 1: mod_base = OTHER; note = 2'-O-methyl-guanosine-3'-phosphorothioate
  modified_base 2: mod_base = OTHER; note = 2'-O-methyl-adenosine-3'-phosphorothioate
  modified_base 3: mod_base = OTHER; note = 2'-O-methyl-adenosine-3'-phosphate
  modified_base 4: mod_base = OTHER; note = 2'-O-methyl-guanosine-3'-phosphate
  modified_base 5: mod_base = OTHER; note = 2'-deoxy-2'-fluoro-adenosine-3'-phosphate
  modified_base 6: mod_base = OTHER; note = 2'-O-methyl-cytidine-3'-phosphate
  modified_base 7: mod_base = OTHER; note = 2'-deoxy-2'-fluoro-adenosine-3'-phosphate
  modified_base 8: mod_base = OTHER; note = 2'-deoxy-2'-fluoro-guanosine-3'-phosphate
  modified_base 9: mod_base = OTHER; note = 2'-deoxy-2'-fluoro-uridine-3'-phosphate
  modified_base 10: mod_base = OTHER; note = 2'-O-methyl-uridine-3'-phosphate
  modified_base 11: mod_base = OTHER; note = 2'-O-methyl-adenosine-3'-phosphate
  modified_base 12: mod_base = OTHER; note = 2'-O-methyl-uridine-3'-phosphate
  modified_base 13: mod_base = OTHER; note = 2'-O-methyl-cytidine-3'-phosphate
  modified_base 14: mod_base = OTHER; note = 2'-O-methyl-uridine-3'-phosphate
  modified_base 15: mod_base = OTHER; note = 2'-O-methyl-cytidine-3'-phosphate
  modified_base 16: mod_base = OTHER; note = 2'-O-methyl-adenosine-3'-phosphate
  modified_base 17: mod_base = OTHER; note = 2'-O-methyl-uridine-3'-phosphate
  modified_base 18: mod_base = OTHER; note = 2'-O-methyl-adenosine-3'-phosphate
  modified_base 19: mod_base = OTHER; note = 2'-O-methyl-adenosine-3'-phosphate
gaagacagttatctcataa

SEQ ID NO: 1445 - RNA, 19 nt, synthetic construct
  source 1..19: mol_type = other RNA
  modified_base 1: mod_base = OTHER; note = 2'-O-methyl-adenosine-3'-phosphorothioate
  modified_base 2: mod_base = OTHER; note = 2'-O-methyl-adenosine-3'-phosphorothioate
  modified_base 3: mod_base = OTHER; note = 2'-O-methyl-guanosine-3'-phosphate
  modified_base 4: mod_base = OTHER; note = 2'-O-methyl-adenosine-3'-phosphate
  modified_base 5: mod_base = OTHER; note = 2'-deoxy-2'-fluoro-cytidine-3'-phosphate
  modified_base 6: mod_base = OTHER; note = 2'-O-methyl-adenosine-3'-phosphate
  modified_base 7: mod_base = OTHER; note = 2'-deoxy-2'-fluoro-guanosine-3'-phosphate
  modified_base 8: mod_base = OTHER; note = 2'-deoxy-2'-fluoro-uridine-3'-phosphate
  modified_base 9: mod_base = OTHER; note = 2'-deoxy-2'-fluoro-uridine-3'-phosphate
  modified_base 10: mod_base = OTHER; note = 2'-O-methyl-adenosine-3'-phosphate
  modified_base 11: mod_base = OTHER; note = 2'-O-methyl-uridine-3'-phosphate
  modified_base 12: mod_base = OTHER; note = 2'-O-methyl-cytidine-3'-phosphate
  modified_base 13: mod_base = OTHER; note = 2'-O-methyl-uridine-3'-phosphate
  modified_base 14: mod_base = OTHER; note = 2'-O-methyl-cytidine-3'-phosphate
  modified_base 15: mod_base = OTHER; note = 2'-O-methyl-adenosine-3'-phosphate
  modified_base 16: mod_base = OTHER; note = 2'-O-methyl-uridine-3'-phosphate
  modified_base 17: mod_base = OTHER; note = 2'-O-methyl-adenosine-3'-phosphate
  modified_base 18: mod_base = OTHER; note = 2'-O-methyl-uridine-3'-phosphate
  modified_base 19: mod_base = OTHER; note = 2'-O-methyl-adenosine-3'-phosphate
aagacagttatctcatata

SEQ ID NO: 1446 - RNA, 19 nt, synthetic construct
  source 1..19: mol_type = other RNA
  modified_base 1: mod_base = OTHER; note = 2'-O-methyl-adenosine-3'-phosphorothioate
  modified_base 2: mod_base = OTHER; note = 2'-O-methyl-cytidine-3'-phosphorothioate
  modified_base 3: mod_base = OTHER; note = 2'-O-methyl-adenosine-3'-phosphate
  modified_base 4: mod_base = OTHER; note = 2'-O-methyl-guanosine-3'-phosphate
  modified_base 5: mod_base = OTHER; note = 2'-deoxy-2'-fluoro-uridine-3'-phosphate
  modified_base 6: mod_base = OTHER; note = 2'-O-methyl-uridine-3'-phosphate
  modified_base 7: mod_base = OTHER; note = 2'-deoxy-2'-fluoro-adenosine-3'-phosphate
  modified_base 8: mod_base = OTHER; note = 2'-deoxy-2'-fluoro-uridine-3'-phosphate
  modified_base 9: mod_base = OTHER; note = 2'-deoxy-2'-fluoro-cytidine-3'-phosphate
  modified_base 10: mod_base = OTHER; note = 2'-O-methyl-uridine-3'-phosphate
  modified_base 11: mod_base = OTHER; note = 2'-O-methyl-cytidine-3'-phosphate
  modified_base 12: mod_base = OTHER; note = 2'-O-methyl-adenosine-3'-phosphate
  modified_base 13: mod_base = OTHER; note = 2'-O-methyl-uridine-3'-phosphate
  modified_base 14: mod_base = OTHER; note = 2'-O-methyl-adenosine-3'-phosphate
  modified_base 15: mod_base = OTHER; note = 2'-O-methyl-uridine-3'-phosphate
  modified_base 16: mod_base = OTHER; note = 2'-O-methyl-uridine-3'-phosphate
  modified_base 17: mod_base = OTHER; note = 2'-O-methyl-uridine-3'-phosphate
  modified_base 18: mod_base = OTHER; note = 2'-O-methyl-guanosine-3'-phosphate
  modified_base 19: mod_base = OTHER; note = 2'-O-methyl-adenosine-3'-phosphate
acagttatctcatatttga

SEQ ID NO: 1447 - RNA, 19 nt, synthetic construct
  source 1..19: mol_type = other RNA
  modified_base 1: mod_base = OTHER; note = 2'-O-methyl-adenosine-3'-phosphorothioate
  modified_base 2: mod_base = OTHER; note = 2'-O-methyl-guanosine-3'-phosphorothioate
  modified_base 3: mod_base = OTHER; note = 2'-O-methyl-uridine-3'-phosphate
  modified_base 4: mod_base = OTHER; note = 2'-O-methyl-uridine-3'-phosphate
  modified_base 5: mod_base = OTHER; note = 2'-deoxy-2'-fluoro-adenosine-3'-phosphate
  modified_base 6: mod_base = OTHER; note = 2'-O-methyl-uridine-3'-phosphate
  modified_base 7: mod_base = OTHER; note = 2'-deoxy-2'-fluoro-cytidine-3'-phosphate
  modified_base 8: mod_base = OTHER; note = 2'-deoxy-2'-fluoro-uridine-3'-phosphate
  modified_base 9: mod_base = OTHER; note = 2'-deoxy-2'-fluoro-cytidine-3'-phosphate
  modified_base 10: mod_base = OTHER; note = 2'-O-methyl-adenosine-3'-phosphate
  modified_base 11: mod_base = OTHER; note = 2'-O-methyl-uridine-3'-phosphate
  modified_base 12: mod_base = OTHER; note = 2'-O-methyl-adenosine-3'-phosphate
  modified_base 13: mod_base = OTHER; note = 2'-O-methyl-uridine-3'-phosphate
  modified_base 14: mod_base = OTHER; note = 2'-O-methyl-uridine-3'-phosphate
  modified_base 15: mod_base = OTHER; note = 2'-O-methyl-uridine-3'-phosphate
  modified_base 16: mod_base = OTHER; note = 2'-O-methyl-guanosine-3'-phosphate
  modified_base 17: mod_base = OTHER; note = 2'-O-methyl-guanosine-3'-phosphate
  modified_base 18: mod_base = OTHER; note = 2'-O-methyl-cytidine-3'-phosphate
  modified_base 19: mod_base = OTHER; note = 2'-O-methyl-adenosine-3'-phosphate
agttatctcatatttggca

SEQ ID NO: 1448 - RNA, 19 nt, synthetic construct
  source 1..19: mol_type = other RNA
  modified_base 1: mod_base = OTHER; note = 2'-O-methyl-adenosine-3'-phosphorothioate
  modified_base 2: mod_base = OTHER; note = 2'-O-methyl-uridine-3'-phosphorothioate
  modified_base 3: mod_base = OTHER; note = 2'-O-methyl-guanosine-3'-phosphate
  modified_base 4: mod_base = OTHER; note = 2'-O-methyl-guanosine-3'-phosphate
  modified_base 5: mod_base = OTHER; note = 2'-deoxy-2'-fluoro-adenosine-3'-phosphate
  modified_base 6: mod_base = OTHER; note = 2'-O-methyl-guanosine-3'-phosphate
  modified_base 7: mod_base = OTHER; note = 2'-deoxy-2'-fluoro-adenosine-3'-phosphate
  modified_base 8: mod_base = OTHER; note = 2'-deoxy-2'-fluoro-adenosine-3'-phosphate
  modified_base 9: mod_base = OTHER; note = 2'-deoxy-2'-fluoro-adenosine-3'-phosphate
  modified_base 10: mod_base = OTHER; note = 2'-O-methyl-guanosine-3'-phosphate
  modified_base 11: mod_base = OTHER; note = 2'-O-methyl-uridine-3'-phosphate
  modified_base 12: mod_base = OTHER; note = 2'-O-methyl-cytidine-3'-phosphate
  modified_base 13: mod_base = OTHER; note = 2'-O-methyl-cytidine-3'-phosphate
  modified_base 14: mod_base = OTHER; note = 2'-O-methyl-adenosine-3'-phosphate
  modified_base 15: mod_base = OTHER; note = 2'-O-methyl-adenosine-3'-phosphate
  modified_base 16: mod_base = OTHER; note = 2'-O-methyl-uridine-3'-phosphate
  modified_base 17: mod_base = OTHER; note = 2'-O-methyl-adenosine-3'-phosphate
  modified_base 18: mod_base = OTHER; note = 2'-O-methyl-cytidine-3'-phosphate
  modified_base 19: mod_base = OTHER; note = 2'-O-methyl-adenosine-3'-phosphate
atggagaaagtccaataca

SEQ ID NO: 1449 - RNA, 19 nt, synthetic construct
  source 1..19: mol_type = other RNA
  modified_base 1: mod_base = OTHER; note = 2'-O-methyl-adenosine-3'-phosphorothioate
  modified_base 2: mod_base = OTHER; note = 2'-O-methyl-guanosine-3'-phosphorothioate
  modified_base 3: mod_base = OTHER; note = 2'-O-methyl-adenosine-3'-phosphate
  modified_base 4: mod_base = OTHER; note = 2'-O-methyl-adenosine-3'-phosphate
  modified_base 5: mod_base = OTHER; note = 2'-deoxy-2'-fluoro-guanosine-3'-phosphate
  modified_base 6: mod_base = OTHER; note = 2'-O-methyl-adenosine-3'-phosphate
  modified_base 7: mod_base = OTHER; note = 2'-deoxy-2'-fluoro-guanosine-3'-phosphate
  modified_base 8: mod_base = OTHER; note = 2'-deoxy-2'-fluoro-cytidine-3'-phosphate
  modified_base 9: mod_base = OTHER; note = 2'-deoxy-2'-fluoro-cytidine-3'-phosphate
  modified_base 10: mod_base = OTHER; note = 2'-O-methyl-uridine-3'-phosphate
  modified_base 11: mod_base = OTHER; note = 2'-O-methyl-cytidine-3'-phosphate
  modified_base 12: mod_base = OTHER; note = 2'-O-methyl-adenosine-3'-phosphate
  modified_base 13: mod_base = OTHER; note = 2'-O-methyl-adenosine-3'-phosphate
  modified_base 14: mod_base = OTHER; note = 2'-O-methyl-cytidine-3'-phosphate
  modified_base 15: mod_base = OTHER; note = 2'-O-methyl-cytidine-3'-phosphate
  modified_base 16: mod_base = OTHER; note = 2'-O-methyl-adenosine-3'-phosphate
  modified_base 17: mod_base = OTHER; note = 2'-O-methyl-uridine-3'-phosphate
  modified_base 18: mod_base = OTHER; note = 2'-O-methyl-uridine-3'-phosphate
  modified_base 19: mod_base = OTHER; note = 2'-O-methyl-adenosine-3'-phosphate
agaagagcctcaaccatta

SEQ ID NO: 1450 - RNA, 19 nt, synthetic construct
  source 1..19: mol_type = other RNA
  modified_base 1: mod_base = OTHER; note = 2'-O-methyl-guanosine-3'-phosphorothioate
  modified_base 2: mod_base = OTHER; note = 2'-O-methyl-adenosine-3'-phosphorothioate
  modified_base 3: mod_base = OTHER; note = 2'-O-methyl-adenosine-3'-phosphate
  modified_base 4: mod_base = OTHER; note = 2'-O-methyl-guanosine-3'-phosphate
  modified_base 5: mod_base = OTHER; note = 2'-deoxy-2'-fluoro-adenosine-3'-phosphate
  modified_base 6: mod_base = OTHER; note = 2'-O-methyl-guanosine-3'-phosphate
  modified_base 7: mod_base = OTHER; note = 2'-deoxy-2'-fluoro-cytidine-3'-phosphate
  modified_base 8: mod_base = OTHER; note = 2'-deoxy-2'-fluoro-cytidine-3'-phosphate
  modified_base 9: mod_base = OTHER; note = 2'-deoxy-2'-fluoro-uridine-3'-phosphate
  modified_base 10: mod_base = OTHER; note = 2'-O-methyl-cytidine-3'-phosphate
  modified_base 11: mod_base = OTHER; note = 2'-O-methyl-adenosine-3'-phosphate
  modified_base 12: mod_base = OTHER; note = 2'-O-methyl-adenosine-3'-phosphate
  modified_base 13: mod_base = OTHER; note = 2'-O-methyl-cytidine-3'-phosphate
  modified_base 14: mod_base = OTHER; note = 2'-O-methyl-cytidine-3'-phosphate
  modified_base 15: mod_base = OTHER; note = 2'-O-methyl-adenosine-3'-phosphate
  modified_base 16: mod_base = OTHER; note = 2'-O-methyl-uridine-3'-phosphate
  modified_base 17: mod_base = OTHER; note = 2'-O-methyl-uridine-3'-phosphate
  modified_base 18: mod_base = OTHER; note = 2'-O-methyl-guanosine-3'-phosphate
  modified_base 19: mod_base = OTHER; note = 2'-O-methyl-adenosine-3'-phosphate
gaagagcctcaaccattga

SEQ ID NO: 1451 - RNA, 19 nt, synthetic construct
  source 1..19: mol_type = other RNA
  modified_base 1: mod_base = OTHER; note = 2'-O-methyl-adenosine-3'-phosphorothioate
  modified_base 2: mod_base = OTHER; note = 2'-O-methyl-adenosine-3'-phosphorothioate
  modified_base 3: mod_base = OTHER; note = 2'-O-methyl-guanosine-3'-phosphate
  modified_base 4: mod_base = OTHER; note = 2'-O-methyl-adenosine-3'-phosphate
  modified_base 5: mod_base = OTHER; note = 2'-deoxy-2'-fluoro-guanosine-3'-phosphate
  modified_base 6: mod_base = OTHER; note = 2'-O-methyl-cytidine-3'-phosphate
  modified_base 7: mod_base = OTHER; note = 2'-deoxy-2'-fluoro-cytidine-3'-phosphate
  modified_base 8: mod_base = OTHER; note = 2'-deoxy-2'-fluoro-uridine-3'-phosphate
  modified_base 9: mod_base = OTHER; note = 2'-deoxy-2'-fluoro-cytidine-3'-phosphate
  modified_base 10: mod_base = OTHER; note = 2'-O-methyl-adenosine-3'-phosphate
  modified_base 11: mod_base = OTHER; note = 2'-O-methyl-adenosine-3'-phosphate
  modified_base 12: mod_base = OTHER; note = 2'-O-methyl-cytidine-3'-phosphate
  modified_base 13: mod_base = OTHER; note = 2'-O-methyl-cytidine-3'-phosphate
  modified_base 14: mod_base = OTHER; note = 2'-O-methyl-adenosine-3'-phosphate
  modified_base 15: mod_base = OTHER; note = 2'-O-methyl-uridine-3'-phosphate
  modified_base 16: mod_base = OTHER; note = 2'-O-methyl-uridine-3'-phosphate
  modified_base 17: mod_base = OTHER; note = 2'-O-methyl-guanosine-3'-phosphate
  modified_base 18: mod_base = OTHER; note = 2'-O-methyl-adenosine-3'-phosphate
  modified_base 19: mod_base = OTHER; note = 2'-O-methyl-adenosine-3'-phosphate
aagagcctcaaccattgaa

SEQ ID NO: 1452 - RNA, 19 nt, synthetic construct
  source 1..19: mol_type = other RNA
  modified_base 1: mod_base = OTHER; note = 2'-O-methyl-adenosine-3'-phosphorothioate
  modified_base 2: mod_base = OTHER; note = 2'-O-methyl-guanosine-3'-phosphorothioate
  modified_base 3: mod_base = OTHER; note = 2'-O-methyl-adenosine-3'-phosphate
  modified_base 4: mod_base = OTHER; note = 2'-O-methyl-guanosine-3'-phosphate
  modified_base 5: mod_base = OTHER; note = 2'-deoxy-2'-fluoro-cytidine-3'-phosphate
  modified_base 6: mod_base = OTHER; note = 2'-O-methyl-cytidine-3'-phosphate
  modified_base 7: mod_base = OTHER; note = 2'-deoxy-2'-fluoro-uridine-3'-phosphate
  modified_base 8: mod_base = OTHER; note = 2'-deoxy-2'-fluoro-cytidine-3'-phosphate
  modified_base 9: mod_base = OTHER; note = 2'-deoxy-2'-fluoro-adenosine-3'-phosphate
  modified_base 10: mod_base = OTHER; note = 2'-O-methyl-adenosine-3'-phosphate
  modified_base 11: mod_base = OTHER; note = 2'-O-methyl-cytidine-3'-phosphate
  modified_base 12: mod_base = OTHER; note = 2'-O-methyl-cytidine-3'-phosphate
  modified_base 13: mod_base = OTHER; note = 2'-O-methyl-adenosine-3'-phosphate
  modified_base 14: mod_base = OTHER; note = 2'-O-methyl-uridine-3'-phosphate
  modified_base 15: mod_base = OTHER; note = 2'-O-methyl-uridine-3'-phosphate
  modified_base 16: mod_base = OTHER; note = 2'-O-methyl-guanosine-3'-phosphate
  modified_base 17: mod_base = OTHER; note = 2'-O-methyl-adenosine-3'-phosphate
  modified_base 18: mod_base = OTHER; note = 2'-O-methyl-adenosine-3'-phosphate
  modified_base 19: mod_base = OTHER; note = 2'-O-methyl-adenosine-3'-phosphate
agagcctcaaccattgaaa

SEQ ID NO: 1453 - RNA, 19 nt, synthetic construct
  source 1..19: mol_type = other RNA
  modified_base 1: mod_base = OTHER; note = 2'-O-methyl-guanosine-3'-phosphorothioate
  modified_base 2: mod_base = OTHER; note = 2'-O-methyl-cytidine-3'-phosphorothioate
  modified_base 3: mod_base = OTHER; note = 2'-O-methyl-cytidine-3'-phosphate
  modified_base 4: mod_base = OTHER; note = 2'-O-methyl-uridine-3'-phosphate
  modified_base 5: mod_base = OTHER; note = 2'-deoxy-2'-fluoro-cytidine-3'-phosphate
  modified_base 6: mod_base = OTHER; note = 2'-O-methyl-adenosine-3'-phosphate
  modified_base 7: mod_base = OTHER; note = 2'-deoxy-2'-fluoro-adenosine-3'-phosphate
  modified_base 8: mod_base = OTHER; note = 2'-deoxy-2'-fluoro-cytidine-3'-phosphate
  modified_base 9: mod_base = OTHER; note = 2'-deoxy-2'-fluoro-cytidine-3'-phosphate
  modified_base 10: mod_base = OTHER; note = 2'-O-methyl-adenosine-3'-phosphate
  modified_base 11: mod_base = OTHER; note = 2'-O-methyl-uridine-3'-phosphate
  modified_base 12: mod_base = OTHER; note = 2'-O-methyl-uridine-3'-phosphate
  modified_base 13: mod_base = OTHER; note = 2'-O-methyl-guanosine-3'-phosphate
  modified_base 14: mod_base = OTHER; note = 2'-O-methyl-adenosine-3'-phosphate
  modified_base 15: mod_base = OTHER; note = 2'-O-methyl-adenosine-3'-phosphate
  modified_base 16: mod_base = OTHER; note = 2'-O-methyl-adenosine-3'-phosphate
  modified_base 17: mod_base = OTHER; note = 2'-O-methyl-uridine-3'-phosphate
  modified_base 18: mod_base = OTHER; note = 2'-O-methyl-guanosine-3'-phosphate
  modified_base 19: mod_base = OTHER; note = 2'-O-methyl-adenosine-3'-phosphate
gcctcaaccattgaaatga

SEQ ID NO: 1454 - RNA, 19 nt, synthetic construct
  source 1..19: mol_type = other RNA
  modified_base 1: mod_base = OTHER; note = 2'-O-methyl-uridine-3'-phosphorothioate
  modified_base 2: mod_base = OTHER; note = 2'-O-methyl-cytidine-3'-phosphorothioate
  modified_base 3: mod_base = OTHER; note = 2'-O-methyl-adenosine-3'-phosphate
  modified_base 4: mod_base = OTHER; note = 2'-O-methyl-adenosine-3'-phosphate
  modified_base 5: mod_base = OTHER; note = 2'-deoxy-2'-fluoro-cytidine-3'-phosphate
  modified_base 6: mod_base = OTHER; note = 2'-O-methyl-cytidine-3'-phosphate
  modified_base 7: mod_base = OTHER; note = 2'-deoxy-2'-fluoro-adenosine-3'-phosphate
  modified_base 8: mod_base = OTHER; note = 2'-deoxy-2'-fluoro-uridine-3'-phosphate
  modified_base 9: mod_base = OTHER; note = 2'-deoxy-2'-fluoro-uridine-3'-phosphate
  modified_base 10: mod_base = OTHER; note = 2'-O-methyl-guanosine-3'-phosphate
  modified_base 11: mod_base = OTHER; note = 2'-O-methyl-adenosine-3'-phosphate
  modified_base 12: mod_base = OTHER; note = 2'-O-methyl-adenosine-3'-phosphate
  modified_base 13: mod_base = OTHER; note = 2'-O-methyl-adenosine-3'-phosphate
  modified_base 14: mod_base = OTHER; note = 2'-O-methyl-uridine-3'-phosphate
  modified_base 15: mod_base = OTHER; note = 2'-O-methyl-guanosine-3'-phosphate
  modified_base 16: mod_base = OTHER; note = 2'-O-methyl-cytidine-3'-phosphate
  modified_base 17: mod_base = OTHER; note = 2'-O-methyl-cytidine-3'-phosphate
  modified_base 18: mod_base = OTHER; note = 2'-O-methyl-uridine-3'-phosphate
  modified_base 19: mod_base = OTHER; note = 2'-O-methyl-adenosine-3'-phosphate
tcaaccattgaaatgccta

SEQ ID NO: 1455 - RNA, 19 nt, synthetic construct
  source 1..19: mol_type = other RNA
  modified_base 1: mod_base = OTHER; note = 2'-O-methyl-cytidine-3'-phosphorothioate
  modified_base 2: mod_base = OTHER; note = 2'-O-methyl-cytidine-3'-phosphorothioate
  modified_base 3: mod_base = OTHER; note = 2'-O-methyl-adenosine-3'-phosphate
  modified_base 4: mod_base = OTHER; note = 2'-O-methyl-uridine-3'-phosphate
  modified_base 5: mod_base = OTHER; note = 2'-deoxy-2'-fluoro-uridine-3'-phosphate
  modified_base 6: mod_base = OTHER; note = 2'-O-methyl-guanosine-3'-phosphate
  modified_base 7: mod_base = OTHER; note = 2'-deoxy-2'-fluoro-adenosine-3'-phosphate
  modified_base 8: mod_base = OTHER; note = 2'-deoxy-2'-fluoro-adenosine-3'-phosphate
  modified_base 9: mod_base = OTHER; note = 2'-deoxy-2'-fluoro-adenosine-3'-phosphate
  modified_base 10: mod_base = OTHER; note = 2'-O-methyl-uridine-3'-phosphate
  modified_base 11: mod_base = OTHER; note = 2'-O-methyl-guanosine-3'-phosphate
  modified_base 12: mod_base = OTHER; note = 2'-O-methyl-cytidine-3'-phosphate
  modified_base 13: mod_base = OTHER; note = 2'-O-methyl-cytidine-3'-phosphate
  modified_base 14: mod_base = OTHER; note = 2'-O-methyl-uridine-3'-phosphate
  modified_base 15: mod_base = OTHER; note = 2'-O-methyl-cytidine-3'-phosphate
  modified_base 16: mod_base = OTHER; note = 2'-O-methyl-adenosine-3'-phosphate
  modified_base 17: mod_base = OTHER; note = 2'-O-methyl-adenosine-3'-phosphate
  modified_base 18: mod_base = OTHER; note = 2'-O-methyl-cytidine-3'-phosphate
  modified_base 19: mod_base = OTHER; note = 2'-O-methyl-adenosine-3'-phosphate
ccattgaaatgcctcaaca

SEQ ID NO: 1456 - RNA, 19 nt, synthetic construct
  source 1..19: mol_type = other RNA
  modified_base 1: mod_base = OTHER; note = 2'-O-methyl-uridine-3'-phosphorothioate
  modified_base 2: mod_base = OTHER; note = 2'-O-methyl-uridine-3'-phosphorothioate
  modified_base 3: mod_base = OTHER; note = 2'-O-methyl-uridine-3'-phosphate
  modified_base 4: mod_base = OTHER; note = 2'-O-methyl-cytidine-3'-phosphate
  modified_base 5: mod_base = OTHER; note = 2'-deoxy-2'-fluoro-uridine-3'-phosphate
  modified_base 6: mod_base = OTHER; note = 2'-O-methyl-guanosine-3'-phosphate
  modified_base 7: mod_base = OTHER; note = 2'-deoxy-2'-fluoro-uridine-3'-phosphate
  modified_base 8: mod_base = OTHER; note = 2'-deoxy-2'-fluoro-cytidine-3'-phosphate
  modified_base 9: mod_base = OTHER; note = 2'-deoxy-2'-fluoro-uridine-3'-phosphate
  modified_base 10: mod_base = OTHER; note = 2'-O-methyl-cytidine-3'-phosphate
  modified_base 11: mod_base = OTHER; note = 2'-O-methyl-adenosine-3'-phosphate
  modified_base 12: mod_base = OTHER; note = 2'-O-methyl-uridine-3'-phosphate
  modified_base 13: mod_base = OTHER; note = 2'-O-methyl-cytidine-3'-phosphate
  modified_base 14: mod_base = OTHER; note = 2'-O-methyl-uridine-3'-phosphate
  modified_base 15: mod_base = OTHER; note = 2'-O-methyl-uridine-3'-phosphate
  modified_base 16: mod_base = OTHER; note = 2'-O-methyl-adenosine-3'-phosphate
  modified_base 17: mod_base = OTHER; note = 2'-O-methyl-adenosine-3'-phosphate
  modified_base 18: mod_base = OTHER; note = 2'-O-methyl-uridine-3'-phosphate
  modified_base 19: mod_base = OTHER; note = 2'-O-methyl-adenosine-3'-phosphate
tttctgtctcatcttaata

SEQ ID NO: 1457 - RNA, 19 nt, synthetic construct
  source 1..19: mol_type = other RNA
  modified_base 1: mod_base = OTHER; note = 2'-O-methyl-uridine-3'-phosphorothioate
  modified_base 2: mod_base = OTHER; note = 2'-O-methyl-cytidine-3'-phosphorothioate
  modified_base 3: mod_base = OTHER; note = 2'-O-methyl-adenosine-3'-phosphate
  modified_base 4: mod_base = OTHER; note = 2'-O-methyl-uridine-3'-phosphate
  modified_base 5: mod_base = OTHER; note = 2'-deoxy-2'-fluoro-cytidine-3'-phosphate
  modified_base 6: mod_base = OTHER; note = 2'-O-methyl-uridine-3'-phosphate
  modified_base 7: mod_base = OTHER; note = 2'-deoxy-2'-fluoro-uridine-3'-phosphate
  modified_base 8: mod_base = OTHER; note = 2'-deoxy-2'-fluoro-adenosine-3'-phosphate
  modified_base 9: mod_base = OTHER; note = 2'-deoxy-2'-fluoro-adenosine-3'-phosphate
  modified_base 10: mod_base = OTHER; note = 2'-O-methyl-uridine-3'-phosphate
  modified_base 11: mod_base = OTHER; note = 2'-O-methyl-adenosine-3'-phosphate
  modified_base 12: mod_base = OTHER; note = 2'-O-methyl-uridine-3'-phosphate
  modified_base 13: mod_base = OTHER; note = 2'-O-methyl-guanosine-3'-phosphate
  modified_base 14: mod_base = OTHER; note = 2'-O-methyl-uridine-3'-phosphate
  modified_base 15: mod_base = OTHER; note = 2'-O-methyl-cytidine-3'-phosphate
  modified_base 16: mod_base = OTHER; note = 2'-O-methyl-uridine-3'-phosphate
  modified_base 17: mod_base = OTHER; note = 2'-O-methyl-cytidine-3'-phosphate
  modified_base 18: mod_base = OTHER; note = 2'-O-methyl-uridine-3'-phosphate
  modified_base 19: mod_base = OTHER; note = 2'-O-methyl-adenosine-3'-phosphate
tcatcttaatatgtctcta

SEQ ID NO: 1458 - RNA, 19 nt, synthetic construct
  source 1..19: mol_type = other RNA
  modified_base 1: mod_base = OTHER; note = 2'-O-methyl-cytidine-3'-phosphorothioate
  modified_base 2: mod_base = OTHER; note = 2'-O-methyl-adenosine-3'-phosphorothioate
  modified_base 3: mod_base = OTHER; note = 2'-O-methyl-uridine-3'-phosphate
  modified_base 4: mod_base = OTHER; note = 2'-O-methyl-cytidine-3'-phosphate
  modified_base 5: mod_base = OTHER; note = 2'-deoxy-2'-fluoro-uridine-3'-phosphate
  modified_base 6: mod_base = OTHER; note = 2'-O-methyl-uridine-3'-phosphate
  modified_base 7: mod_base = OTHER; note = 2'-deoxy-2'-fluoro-adenosine-3'-phosphate
  modified_base 8: mod_base = OTHER; note = 2'-deoxy-2'-fluoro-adenosine-3'-phosphate
  modified_base 9: mod_base = OTHER; note = 2'-deoxy-2'-fluoro-uridine-3'-phosphate
  modified_base 10: mod_base = OTHER; note = 2'-O-methyl-adenosine-3'-phosphate
  modified_base 11: mod_base = OTHER; note = 2'-O-methyl-uridine-3'-phosphate
  modified_base 12: mod_base = OTHER; note = 2'-O-methyl-guanosine-3'-phosphate
  modified_base 13: mod_base = OTHER; note = 2'-O-methyl-uridine-3'-phosphate
  modified_base 14: mod_base = OTHER; note = 2'-O-methyl-cytidine-3'-phosphate
  modified_base 15: mod_base = OTHER; note = 2'-O-methyl-uridine-3'-phosphate
  modified_base 16: mod_base = OTHER; note = 2'-O-methyl-cytidine-3'-phosphate
  modified_base 17: mod_base = OTHER; note = 2'-O-methyl-uridine-3'-phosphate
  modified_base 18: mod_base = OTHER; note = 2'-O-methyl-uridine-3'-phosphate
  modified_base 19: mod_base = OTHER; note = 2'-O-methyl-adenosine-3'-phosphate
catcttaatatgtctctta

SEQ ID NO: 1459 - RNA, 19 nt, synthetic construct
  source 1..19: mol_type = other RNA
  modified_base 1: mod_base = OTHER; note = 2'-O-methyl-guanosine-3'-phosphorothioate
  modified_base 2: mod_base = OTHER; note = 2'-O-methyl-uridine-3'-phosphorothioate
  modified_base 3: mod_base = OTHER; note = 2'-O-methyl-cytidine-3'-phosphate
  modified_base 4: mod_base = OTHER; note = 2'-O-methyl-uridine-3'-phosphate
  modified_base 5: mod_base = OTHER; note = 2'-deoxy-2'-fluoro-cytidine-3'-phosphate
  modified_base 6: mod_base = OTHER; note = 2'-O-methyl-uridine-3'-phosphate
  modified_base 7: mod_base = OTHER; note = 2'-deoxy-2'-fluoro-uridine-3'-phosphate
  modified_base 8: mod_base = OTHER; note = 2'-deoxy-2'-fluoro-guanosine-3'-phosphate
  modified_base 9: mod_base = OTHER; note = 2'-deoxy-2'-fluoro-cytidine-3'-phosphate
  modified_base 10: mod_base = OTHER; note = 2'-O-methyl-uridine-3'-phosphate
  modified_base 11: mod_base = OTHER; note = 2'-O-methyl-guanosine-3'-phosphate
  modified_base 12: mod_base = OTHER; note = 2'-O-methyl-adenosine-3'-phosphate
  modified_base 13: mod_base = OTHER; note = 2'-O-methyl-uridine-3'-phosphate
  modified_base 14: mod_base = OTHER; note = 2'-O-methyl-cytidine-3'-phosphate
  modified_base 15: mod_base = OTHER; note = 2'-O-methyl-uridine-3'-phosphate
  modified_base 16: mod_base = OTHER; note = 2'-O-methyl-guanosine-3'-phosphate
  modified_base 17: mod_base = OTHER; note = 2'-O-methyl-uridine-3'-phosphate
  modified_base 18: mod_base = OTHER; note = 2'-O-methyl-adenosine-3'-phosphate
  modified_base 19: mod_base = OTHER; note = 2'-O-methyl-adenosine-3'-phosphate
gtctcttgctgatctgtaa

SEQ ID NO: 1460 - RNA, 19 nt, synthetic construct
  source 1..19: mol_type = other RNA
  modified_base 1: mod_base = OTHER; note = 2'-O-methyl-uridine-3'-phosphorothioate
  modified_base 2: mod_base = OTHER; note = 2'-O-methyl-cytidine-3'-phosphorothioate
  modified_base 3: mod_base = OTHER; note = 2'-O-methyl-uridine-3'-phosphate
  modified_base 4: mod_base = OTHER; note = 2'-O-methyl-cytidine-3'-phosphate
  modified_base 5: mod_base = OTHER; note = 2'-deoxy-2'-fluoro-uridine-3'-phosphate
  modified_base 6: mod_base = OTHER; note = 2'-O-methyl-uridine-3'-phosphate
  modified_base 7: mod_base = OTHER; note = 2'-deoxy-2'-fluoro-guanosine-3'-phosphate
  modified_base 8: mod_base = OTHER; note = 2'-deoxy-2'-fluoro-cytidine-3'-phosphate
  modified_base 9: mod_base = OTHER; note = 2'-deoxy-2'-fluoro-uridine-3'-phosphate
  modified_base 10: mod_base = OTHER; note = 2'-O-methyl-guanosine-3'-phosphate
  modified_base 11: mod_base = OTHER; note = 2'-O-methyl-adenosine-3'-phosphate
  modified_base 12: mod_base = OTHER; note = 2'-O-methyl-uridine-3'-phosphate
  modified_base 13: mod_base = OTHER; note = 2'-O-methyl-cytidine-3'-phosphate
  modified_base 14: mod_base = OTHER; note = 2'-O-methyl-uridine-3'-phosphate
  modified_base 15: mod_base = OTHER; note = 2'-O-methyl-guanosine-3'-phosphate
  modified_base 16: mod_base = OTHER; note = 2'-O-methyl-uridine-3'-phosphate
  modified_base 17: mod_base = OTHER; note = 2'-O-methyl-adenosine-3'-phosphate
  modified_base 18: mod_base = OTHER; note = 2'-O-methyl-uridine-3'-phosphate
  modified_base 19: mod_base = OTHER; note = 2'-O-methyl-adenosine-3'-phosphate
tctcttgctgatctgtata

SEQ ID NO: 1461 - RNA, 19 nt, synthetic construct
  source 1..19: mol_type = other RNA
  modified_base 1: mod_base = OTHER; note = 2'-O-methyl-cytidine-3'-phosphorothioate
  modified_base 2: mod_base = OTHER; note = 2'-O-methyl-uridine-3'-phosphorothioate
  modified_base 3: mod_base = OTHER; note = 2'-O-methyl-cytidine-3'-phosphate
  modified_base 4: mod_base = OTHER; note = 2'-O-methyl-uridine-3'-phosphate
  modified_base 5: mod_base = OTHER; note = 2'-deoxy-2'-fluoro-uridine-3'-phosphate
  modified_base 6: mod_base = OTHER; note = 2'-O-methyl-guanosine-3'-phosphate
  modified_base 7: mod_base = OTHER; note = 2'-deoxy-2'-fluoro-cytidine-3'-phosphate
  modified_base 8: mod_base = OTHER; note = 2'-deoxy-2'-fluoro-uridine-3'-phosphate
  modified_base 9: mod_base = OTHER; note = 2'-deoxy-2'-fluoro-guanosine-3'-phosphate
  modified_base 10: mod_base = OTHER; note = 2'-O-methyl-adenosine-3'-phosphate
  modified_base 11: mod_base = OTHER; note = 2'-O-methyl-uridine-3'-phosphate
  modified_base 12: mod_base = OTHER; note = 2'-O-methyl-cytidine-3'-phosphate
  modified_base 13: mod_base = OTHER; note = 2'-O-methyl-uridine-3'-phosphate
  modified_base 14: mod_base = OTHER; note = 2'-O-methyl-guanosine-3'-phosphate
  modified_base 15: mod_base = OTHER; note = 2'-O-methyl-uridine-3'-phosphate
  modified_base 16: mod_base = OTHER; note = 2'-O-methyl-adenosine-3'-phosphate
  modified_base 17: mod_base = OTHER; note = 2'-O-methyl-uridine-3'-phosphate
  modified_base 18: mod_base = OTHER; note = 2'-O-methyl-cytidine-3'-phosphate
  modified_base 19: mod_base = OTHER; note = 2'-O-methyl-adenosine-3'-phosphate
ctcttgctgatctgtatca

SEQ ID NO: 1462 - RNA, 19 nt, synthetic construct
  source 1..19: mol_type = other RNA
  modified_base 1: mod_base = OTHER; note = 2'-O-methyl-uridine-3'-phosphorothioate
  modified_base 2: mod_base = OTHER; note = 2'-O-methyl-cytidine-3'-phosphorothioate
  modified_base 3: mod_base = OTHER; note = 2'-O-methyl-uridine-3'-phosphate
  modified_base 4: mod_base = OTHER; note = 2'-O-methyl-uridine-3'-phosphate
  modified_base 5: mod_base = OTHER; note = 2'-deoxy-2'-fluoro-guanosine-3'-phosphate
  modified_base 6: mod_base = OTHER; note = 2'-O-methyl-cytidine-3'-phosphate
  modified_base 7: mod_base = OTHER; note = 2'-deoxy-2'-fluoro-uridine-3'-phosphate
  modified_base 8: mod_base = OTHER; note = 2'-deoxy-2'-fluoro-guanosine-3'-phosphate
  modified_base 9: mod_base = OTHER; note = 2'-deoxy-2'-fluoro-adenosine-3'-phosphate
  modified_base 10: mod_base = OTHER; note = 2'-O-methyl-uridine-3'-phosphate
  modified_base 11: mod_base = OTHER; note = 2'-O-methyl-cytidine-3'-phosphate
  modified_base 12: mod_base = OTHER; note = 2'-O-methyl-uridine-3'-phosphate
  modified_base 13: mod_base = OTHER; note = 2'-O-methyl-guanosine-3'-phosphate
  modified_base 14: mod_base = OTHER; note = 2'-O-methyl-uridine-3'-phosphate
  modified_base 15: mod_base = OTHER; note = 2'-O-methyl-adenosine-3'-phosphate
  modified_base 16: mod_base = OTHER; note = 2'-O-methyl-uridine-3'-phosphate
  modified_base 17: mod_base = OTHER; note = 2'-O-methyl-cytidine-3'-phosphate
  modified_base 18: mod_base = OTHER; note = 2'-O-methyl-adenosine-3'-phosphate
  modified_base 19: mod_base = OTHER; note = 2'-O-methyl-adenosine-3'-phosphate
tcttgctgatctgtatcaa

SEQ ID NO: 1463 - RNA, 19 nt, synthetic construct
  source 1..19: mol_type = other RNA
  modified_base 1: mod_base = OTHER; note = 2'-O-methyl-cytidine-3'-phosphorothioate
  modified_base 2: mod_base = OTHER; note = 2'-O-methyl-uridine-3'-phosphorothioate
  modified_base 3: mod_base = OTHER; note = 2'-O-methyl-uridine-3'-phosphate
  modified_base 4: mod_base = OTHER; note = 2'-O-methyl-guanosine-3'-phosphate
  modified_base 5: mod_base = OTHER; note = 2'-deoxy-2'-fluoro-cytidine-3'-phosphate
  modified_base 6: mod_base = OTHER; note = 2'-O-methyl-uridine-3'-phosphate
  modified_base 7: mod_base = OTHER; note = 2'-deoxy-2'-fluoro-guanosine-3'-phosphate
  modified_base 8: mod_base = OTHER; note = 2'-deoxy-2'-fluoro-adenosine-3'-phosphate
  modified_base 9: mod_base = OTHER; note = 2'-deoxy-2'-fluoro-uridine-3'-phosphate
  modified_base 10: mod_base = OTHER; note = 2'-O-methyl-cytidine-3'-phosphate
  modified_base 11: mod_base = OTHER; note = 2'-O-methyl-uridine-3'-phosphate
  modified_base 12: mod_base = OTHER; note = 2'-O-methyl-guanosine-3'-phosphate
  modified_base 13: mod_base = OTHER; note = 2'-O-methyl-uridine-3'-phosphate
  modified_base 14: mod_base = OTHER; note = 2'-O-methyl-adenosine-3'-phosphate
  modified_base 15: mod_base = OTHER; note = 2'-O-methyl-uridine-3'-phosphate
  modified_base 16: mod_base = OTHER; note = 2'-O-methyl-cytidine-3'-phosphate
  modified_base 17: mod_base = OTHER; note = 2'-O-methyl-adenosine-3'-phosphate
  modified_base 18: mod_base = OTHER; note = 2'-O-methyl-uridine-3'-phosphate
  modified_base 19: mod_base = OTHER; note = 2'-O-methyl-adenosine-3'-phosphate
cttgctgatctgtatcata

SEQ ID NO: 1464 - RNA, 19 nt, synthetic construct
  source 1..19: mol_type = other RNA
  modified_base 1: mod_base = OTHER; note = 2'-O-methyl-guanosine-3'-phosphorothioate
  modified_base 2: mod_base = OTHER; note = 2'-O-methyl-adenosine-3'-phosphorothioate
  modified_base 3: mod_base = OTHER; note = 2'-O-methyl-uridine-3'-phosphate
  modified_base 4: mod_base = OTHER; note = 2'-O-methyl-guanosine-3'-phosphate
  modified_base 5: mod_base = OTHER; note = 2'-deoxy-2'-fluoro-cytidine-3'-phosphate
  modified_base 6: mod_base = OTHER; note = 2'-O-methyl-uridine-3'-phosphate
  modified_base 7: mod_base = OTHER; note = 2'-deoxy-2'-fluoro-uridine-3'-phosphate
  modified_base 8: mod_base = OTHER; note = 2'-deoxy-2'-fluoro-cytidine-3'-phosphate
  modified_base 9: mod_base = OTHER; note = 2'-deoxy-2'-fluoro-uridine-3'-phosphate
  modified_base 10: mod_base = OTHER; note = 2'-O-methyl-cytidine-3'-phosphate
  modified_base 11: mod_base = OTHER; note = 2'-O-methyl-uridine-3'-phosphate
  modified_base 12: mod_base = OTHER; note = 2'-O-methyl-guanosine-3'-phosphate
  modified_base 13: mod_base = OTHER; note = 2'-O-methyl-adenosine-3'-phosphate
  modified_base 14: mod_base = OTHER; note = 2'-O-methyl-adenosine-3'-phosphate
  modified_base 15: mod_base = OTHER; note = 2'-O-methyl-guanosine-3'-phosphate
  modified_base 16: mod_base = OTHER; note = 2'-O-methyl-uridine-3'-phosphate
  modified_base 17: mod_base = OTHER; note = 2'-O-methyl-uridine-3'-phosphate
  modified_base 18: mod_base = OTHER; note = 2'-O-methyl-cytidine-3'-phosphate
  modified_base 19: mod_base = OTHER; note = 2'-O-methyl-adenosine-3'-phosphate
gatgcttctctgaagttca

SEQ ID NO: 1465 - RNA, 19 nt, synthetic construct
  source 1..19: mol_type = other RNA
  modified_base 1: mod_base = OTHER; note = 2'-O-methyl-adenosine-3'-phosphorothioate
  modified_base 2: mod_base = OTHER; note = 2'-O-methyl-uridine-3'-phosphorothioate
  modified_base 3: mod_base = OTHER; note = 2'-O-methyl-guanosine-3'-phosphate
  modified_base 4: mod_base = OTHER; note = 2'-O-methyl-cytidine-3'-phosphate
  modified_base 5: mod_base = OTHER; note = 2'-deoxy-2'-fluoro-uridine-3'-phosphate
  modified_base 6: mod_base = OTHER; note = 2'-O-methyl-uridine-3'-phosphate
  modified_base 7: mod_base = OTHER; note = 2'-deoxy-2'-fluoro-cytidine-3'-phosphate
  modified_base 8: mod_base = OTHER; note = 2'-deoxy-2'-fluoro-uridine-3'-phosphate
  modified_base 9: mod_base = OTHER; note = 2'-deoxy-2'-fluoro-cytidine-3'-phosphate
  modified_base 10: mod_base = OTHER; note = 2'-O-methyl-uridine-3'-phosphate
  modified_base 11: mod_base = OTHER; note = 2'-O-methyl-guanosine-3'-phosphate
  modified_base 12: mod_base = OTHER; note = 2'-O-methyl-adenosine-3'-phosphate
  modified_base 13: mod_base = OTHER; note = 2'-O-methyl-adenosine-3'-phosphate
  modified_base 14: mod_base = OTHER; note = 2'-O-methyl-guanosine-3'-phosphate
  modified_base 15: mod_base = OTHER; note = 2'-O-methyl-uridine-3'-phosphate
  modified_base 16: mod_base = OTHER; note = 2'-O-methyl-uridine-3'-phosphate
  modified_base 17: mod_base = OTHER; note = 2'-O-methyl-cytidine-3'-phosphate
  modified_base 18: mod_base = OTHER; note = 2'-O-methyl-uridine-3'-phosphate
  modified_base 19: mod_base = OTHER; note = 2'-O-methyl-adenosine-3'-phosphate
atgcttctctgaagttcta

SEQ ID NO: 1466 - RNA, 19 nt, synthetic construct
  source 1..19: mol_type = other RNA
  modified_base 1: mod_base = OTHER; note = 2'-O-methyl-uridine-3'-phosphorothioate
  modified_base 2: mod_base = OTHER; note = 2'-O-methyl-cytidine-3'-phosphorothioate
  modified_base 3: mod_base = OTHER; note = 2'-O-methyl-uridine-3'-phosphate
  modified_base 4: mod_base = OTHER; note = 2'-O-methyl-cytidine-3'-phosphate
  modified_base 5: mod_base = OTHER; note = 2'-deoxy-2'-fluoro-uridine-3'-phosphate
  modified_base 6: mod_base = OTHER; note = 2'-O-methyl-guanosine-3'-phosphate
  modified_base 7: mod_base = OTHER; note = 2'-deoxy-2'-fluoro-adenosine-3'-phosphate
  modified_base 8: mod_base = OTHER; note = 2'-deoxy-2'-fluoro-adenosine-3'-phosphate
  modified_base 9: mod_base = OTHER; note = 2'-deoxy-2'-fluoro-guanosine-3'-phosphate
  modified_base 10: mod_base = OTHER; note = 2'-O-methyl-uridine-3'-phosphate
  modified_base 11: mod_base = OTHER; note = 2'-O-methyl-uridine-3'-phosphate
  modified_base 12: mod_base = OTHER; note = 2'-O-methyl-cytidine-3'-phosphate
  modified_base 13: mod_base = OTHER; note = 2'-O-methyl-uridine-3'-phosphate
  modified_base 14: mod_base = OTHER; note = 2'-O-methyl-guanosine-3'-phosphate
  modified_base 15: mod_base = OTHER; note = 2'-O-methyl-cytidine-3'-phosphate
  modified_base 16: mod_base = OTHER; note = 2'-O-methyl-uridine-3'-phosphate
  modified_base 17: mod_base = OTHER; note = 2'-O-methyl-adenosine-3'-phosphate
  modified_base 18: mod_base = OTHER; note = 2'-O-methyl-cytidine-3'-phosphate
  modified_base 19: mod_base = OTHER; note = 2'-O-methyl-adenosine-3'-phosphate
tctctgaagttctgctaca

SEQ ID NO: 1467 - RNA, 19 nt, synthetic construct
  source 1..19: mol_type = other RNA
  modified_base 1: mod_base = OTHER; note = 2'-O-methyl-guanosine-3'-phosphorothioate
  modified_base 2: mod_base = OTHER; note = 2'-O-methyl-adenosine-3'-phosphorothioate
  modified_base 3: mod_base = OTHER; note = 2'-O-methyl-adenosine-3'-phosphate
  modified_base 4: mod_base = OTHER; note = 2'-O-methyl-guanosine-3'-phosphate
  modified_base 5: mod_base = OTHER; note = 2'-deoxy-2'-fluoro-uridine-3'-phosphate
  modified_base 6: mod_base = OTHER; note = 2'-O-methyl-uridine-3'-phosphate
  modified_base 7: mod_base = OTHER; note = 2'-deoxy-2'-fluoro-cytidine-3'-phosphate
  modified_base 8: mod_base = OTHER; note = 2'-deoxy-2'-fluoro-uridine-3'-phosphate
  modified_base 9: mod_base = OTHER; note = 2'-deoxy-2'-fluoro-guanosine-3'-phosphate
  modified_base 10: mod_base = OTHER; note = 2'-O-methyl-cytidine-3'-phosphate
  modified_base 11: mod_base = OTHER; note = 2'-O-methyl-uridine-3'-phosphate
  modified_base 12: mod_base = OTHER; note = 2'-O-methyl-adenosine-3'-phosphate
  modified_base 13: mod_base = OTHER; note = 2'-O-methyl-cytidine-3'-phosphate
  modified_base 14: mod_base = OTHER; note = 2'-O-methyl-adenosine-3'-phosphate
  modified_base 15: mod_base = OTHER; note = 2'-O-methyl-adenosine-3'-phosphate
  modified_base 16: mod_base = OTHER; note = 2'-O-methyl-cytidine-3'-phosphate
  modified_base 17: mod_base = OTHER; note = 2'-O-methyl-cytidine-3'-phosphate
  modified_base 18: mod_base = OTHER; note = 2'-O-methyl-uridine-3'-phosphate
  modified_base 19: mod_base = OTHER; note = 2'-O-methyl-adenosine-3'-phosphate
gaagttctgctacaaccta

SEQ ID NO: 1468 - RNA, 19 nt, synthetic construct
  source 1..19: mol_type = other RNA
  modified_base 1: mod_base = OTHER; note = 2'-O-methyl-uridine-3'-phosphorothioate
  modified_base 2: mod_base = OTHER; note = 2'-O-methyl-adenosine-3'-phosphorothioate
  modified_base 3: mod_base = OTHER; note = 2'-O-methyl-cytidine-3'-phosphate
  modified_base 4: mod_base = OTHER; note = 2'-O-methyl-adenosine-3'-phosphate
  modified_base 5: mod_base = OTHER; note = 2'-deoxy-2'-fluoro-adenosine-3'-phosphate
  modified_base 6: mod_base = OTHER; note = 2'-O-methyl-cytidine-3'-phosphate
  modified_base 7: mod_base = OTHER; note = 2'-deoxy-2'-fluoro-cytidine-3'-phosphate
  modified_base 8: mod_base = OTHER; note = 2'-deoxy-2'-fluoro-uridine-3'-phosphate
  modified_base 9: mod_base = OTHER; note = 2'-deoxy-2'-fluoro-cytidine-3'-phosphate
  modified_base 10: mod_base = OTHER; note = 2'-O-methyl-uridine-3'-phosphate
  modified_base 11: mod_base = OTHER; note = 2'-O-methyl-adenosine-3'-phosphate
  modified_base 12: mod_base = OTHER; note = 2'-O-methyl-guanosine-3'-phosphate
  modified_base 13: mod_base = OTHER; note = 2'-O-methyl-adenosine-3'-phosphate
  modified_base 14: mod_base = OTHER; note = 2'-O-methyl-uridine-3'-phosphate
  modified_base 15: mod_base = OTHER; note = 2'-O-methyl-cytidine-3'-phosphate
  modified_base 16: mod_base = OTHER; note = 2'-O-methyl-uridine-3'-phosphate
  modified_base 17: mod_base = OTHER; note = 2'-O-methyl-guanosine-3'-phosphate
  modified_base 18: mod_base = OTHER; note = 2'-O-methyl-cytidine-3'-phosphate
  modified_base 19: mod_base = OTHER; note = 2'-O-methyl-adenosine-3'-phosphate
tacaacctctagatctgca

SEQ ID NO: 1469 - RNA, 19 nt, synthetic construct
  source 1..19: mol_type = other RNA
  modified_base 1: mod_base = OTHER; note = 2'-O-methyl-uridine-3'-phosphorothioate
  modified_base 2: mod_base = OTHER; note = 2'-O-methyl-cytidine-3'-phosphorothioate
  modified_base 3: mod_base = OTHER; note = 2'-O-methyl-uridine-3'-phosphate
  modified_base 4: mod_base = OTHER; note = 2'-O-methyl-guanosine-3'-phosphate
  modified_base 5: mod_base = OTHER; note = 2'-deoxy-2'-fluoro-uridine-3'-phosphate
  modified_base 6: mod_base = OTHER; note = 2'-O-methyl-cytidine-3'-phosphate
  modified_base 7: mod_base = OTHER; note = 2'-deoxy-2'-fluoro-adenosine-3'-phosphate
  modified_base 8: mod_base = OTHER; note = 2'-deoxy-2'-fluoro-uridine-3'-phosphate
  modified_base 9: mod_base = OTHER; note = 2'-deoxy-2'-fluoro-cytidine-3'-phosphate
  modified_base 10: mod_base = OTHER; note = 2'-O-methyl-cytidine-3'-phosphate
  modified_base 11: mod_base = OTHER; note = 2'-O-methyl-cytidine-3'-phosphate
  modified_base 12: mod_base = OTHER; note = 2'-O-methyl-adenosine-3'-phosphate
  modified_base 13: mod_base = OTHER; note = 2'-O-methyl-uridine-3'-phosphate
  modified_base 14: mod_base = OTHER; note = 2'-O-methyl-guanosine-3'-phosphate
  modified_base 15: mod_base = OTHER; note = 2'-O-methyl-cytidine-3'-phosphate
  modified_base 16: mod_base = OTHER; note = 2'-O-methyl-adenosine-3'-phosphate
  modified_base 17: mod_base = OTHER; note = 2'-O-methyl-guanosine-3'-phosphate
  modified_base 18: mod_base = OTHER; note = 2'-O-methyl-adenosine-3'-phosphate
  modified_base 19: mod_base = OTHER; note = 2'-O-methyl-adenosine-3'-phosphate
tctgtcatcccatgcagaa

SEQ ID NO: 1470 - RNA, 19 nt, synthetic construct
  source 1..19: mol_type = other RNA
  modified_base 1: mod_base = OTHER; note = 2'-O-methyl-cytidine-3'-phosphorothioate
  modified_base 2: mod_base = OTHER; note = 2'-O-methyl-adenosine-3'-phosphorothioate
  modified_base 3: mod_base = OTHER; note = 2'-O-methyl-cytidine-3'-phosphate
  modified_base 4: mod_base = OTHER; note = 2'-O-methyl-uridine-3'-phosphate
  modified_base 5: mod_base = OTHER; note = 2'-deoxy-2'-fluoro-uridine-3'-phosphate
  modified_base 6: mod_base = OTHER; note = 2'-O-methyl-cytidine-3'-phosphate
  modified_base 7: mod_base = OTHER; note = 2'-deoxy-2'-fluoro-cytidine-3'-phosphate
  modified_base 8: mod_base = OTHER; note = 2'-deoxy-2'-fluoro-uridine-3'-phosphate
  modified_base 9: mod_base = OTHER; note = 2'-deoxy-2'-fluoro-guanosine-3'-phosphate
  modified_base 10: mod_base = OTHER; note = 2'-O-methyl-adenosine-3'-phosphate
  modified_base 11: mod_base = OTHER; note = 2'-O-methyl-guanosine-3'-phosphate
  modified_base 12: mod_base = OTHER; note = 2'-O-methyl-uridine-3'-phosphate
  modified_base 13: mod_base = OTHER; note = 2'-O-methyl-adenosine-3'-phosphate
  modified_base 14: mod_base = OTHER; note = 2'-O-methyl-guanosine-3'-phosphate
  modified_base 15: mod_base = OTHER; note = 2'-O-methyl-adenosine-3'-phosphate
  modified_base 16: mod_base = OTHER; note = 2'-O-methyl-adenosine-3'-phosphate
  modified_base 17: mod_base = OTHER; note = 2'-O-methyl-guanosine-3'-phosphate
  modified_base 18: mod_base = OTHER; note = 2'-O-methyl-adenosine-3'-phosphate
  modified_base 19: mod_base = OTHER; note = 2'-O-methyl-adenosine-3'-phosphate
cacttcctgagtagaagaa

SEQ ID NO: 1471 - RNA, 19 nt, synthetic construct
  source 1..19: mol_type = other RNA
  modified_base 1: mod_base = OTHER; note = 2'-O-methyl-uridine-3'-phosphorothioate
  modified_base 2: mod_base = OTHER; note = 2'-O-methyl-cytidine-3'-phosphorothioate
  modified_base 3: mod_base = OTHER; note = 2'-O-methyl-cytidine-3'-phosphate
  modified_base 4: mod_base = OTHER; note = 2'-O-methyl-uridine-3'-phosphate
  modified_base 5: mod_base = OTHER; note = 2'-deoxy-2'-fluoro-guanosine-3'-phosphate
  modified_base 6: mod_base = OTHER; note = 2'-O-methyl-adenosine-3'-phosphate
  modified_base 7: mod_base = OTHER; note = 2'-deoxy-2'-fluoro-guanosine-3'-phosphate
  modified_base 8: mod_base = OTHER; note = 2'-deoxy-2'-fluoro-uridine-3'-phosphate
  modified_base 9: mod_base = OTHER; note = 2'-deoxy-2'-fluoro-adenosine-3'-phosphate
  modified_base 10: mod_base = OTHER; note = 2'-O-methyl-guanosine-3'-phosphate
  modified_base 11: mod_base = OTHER; note = 2'-O-methyl-adenosine-3'-phosphate
  modified_base 12: mod_base = OTHER; note = 2'-O-methyl-adenosine-3'-phosphate
  modified_base 13: mod_base = OTHER; note = 2'-O-methyl-guanosine-3'-phosphate
  modified_base 14: mod_base = OTHER; note = 2'-O-methyl-adenosine-3'-phosphate
  modified_base 15: mod_base = OTHER; note = 2'-O-methyl-guanosine-3'-phosphate
  modified_base 16: mod_base = OTHER; note = 2'-O-methyl-uridine-3'-phosphate
  modified_base 17: mod_base = OTHER; note = 2'-O-methyl-uridine-3'-phosphate
  modified_base 18: mod_base = OTHER; note = 2'-O-methyl-uridine-3'-phosphate
  modified_base 19: mod_base = OTHER; note = 2'-O-methyl-adenosine-3'-phosphate
tcctgagtagaagagttta

SEQ ID NO: 1472 - RNA, 19 nt, synthetic construct
  source 1..19: mol_type = other RNA
  modified_base 1: mod_base = OTHER; note = 2'-O-methyl-cytidine-3'-phosphorothioate
  modified_base 2: mod_base = OTHER; note = 2'-O-methyl-uridine-3'-phosphorothioate
  modified_base 3: mod_base = OTHER; note = 2'-O-methyl-guanosine-3'-phosphate
  modified_base 4: mod_base = OTHER; note = 2'-O-methyl-adenosine-3'-phosphate
  modified_base 5: mod_base = OTHER; note = 2'-deoxy-2'-fluoro-guanosine-3'-phosphate
  modified_base 6: mod_base = OTHER; note = 2'-O-methyl-uridine-3'-phosphate
  modified_base 7: mod_base = OTHER; note = 2'-deoxy-2'-fluoro-adenosine-3'-phosphate
  modified_base 8: mod_base = OTHER; note = 2'-deoxy-2'-fluoro-guanosine-3'-phosphate
  modified_base 9: mod_base = OTHER; note = 2'-deoxy-2'-fluoro-adenosine-3'-phosphate
  modified_base 10: mod_base = OTHER; note = 2'-O-methyl-adenosine-3'-phosphate
  modified_base 11: mod_base = OTHER; note = 2'-O-methyl-guanosine-3'-phosphate
  modified_base 12: mod_base = OTHER; note = 2'-O-methyl-adenosine-3'-phosphate
  modified_base 13: mod_base = OTHER; note = 2'-O-methyl-guanosine-3'-phosphate
  modified_base 14: mod_base = OTHER; note = 2'-O-methyl-uridine-3'-phosphate
  modified_base 15: mod_base = OTHER; note = 2'-O-methyl-uridine-3'-phosphate
  modified_base 16: mod_base = OTHER; note = 2'-O-methyl-uridine-3'-phosphate
  modified_base 17: mod_base = OTHER; note = 2'-O-methyl-cytidine-3'-phosphate
  modified_base 18: mod_base = OTHER; note = 2'-O-methyl-uridine-3'-phosphate
  modified_base 19: mod_base = OTHER; note = 2'-O-methyl-adenosine-3'-phosphate
ctgagtagaagagtttcta

SEQ ID NO: 1473 - RNA, 19 nt, synthetic construct
  source 1..19: mol_type = other RNA
  modified_base 1: mod_base = OTHER; note = 2'-O-methyl-guanosine-3'-phosphorothioate
  modified_base 2: mod_base = OTHER; note = 2'-O-methyl-guanosine-3'-phosphorothioate
  modified_base 3: mod_base = OTHER; note = 2'-O-methyl-uridine-3'-phosphate
  modified_base 4: mod_base = OTHER; note = 2'-O-methyl-cytidine-3'-phosphate
  modified_base 5: mod_base = OTHER; note = 2'-deoxy-2'-fluoro-adenosine-3'-phosphate
  modified_base 6: mod_base = OTHER; note = 2'-O-methyl-adenosine-3'-phosphate
  modified_base 7: mod_base = OTHER; note = 2'-deoxy-2'-fluoro-guanosine-3'-phosphate
  modified_base 8: mod_base = OTHER; note = 2'-deoxy-2'-fluoro-adenosine-3'-phosphate
  modified_base 9: mod_base = OTHER; note = 2'-deoxy-2'-fluoro-uridine-3'-phosphate
  modified_base 10: mod_base = OTHER; note = 2'-O-methyl-uridine-3'-phosphate
  modified_base 11: mod_base = OTHER; note = 2'-O-methyl-adenosine-3'-phosphate
  modified_base 12: mod_base = OTHER; note = 2'-O-methyl-adenosine-3'-phosphate
  modified_base 13: mod_base = OTHER; note = 2'-O-methyl-guanosine-3'-phosphate
  modified_base 14: mod_base = OTHER; note = 2'-O-methyl-adenosine-3'-phosphate
  modified_base 15: mod_base = OTHER; note = 2'-O-methyl-cytidine-3'-phosphate
  modified_base 16: mod_base = OTHER; note = 2'-O-methyl-uridine-3'-phosphate
  modified_base 17: mod_base = OTHER; note = 2'-O-methyl-adenosine-3'-phosphate
  modified_base 18: mod_base = OTHER; note = 2'-O-methyl-adenosine-3'-phosphate
  modified_base 19: mod_base = OTHER; note = 2'-O-methyl-adenosine-3'-phosphate
ggtcaagattaagactaaa

SEQ ID NO: 1474 - RNA, 19 nt, synthetic construct
  source 1..19: mol_type = other RNA
  modified_base 1: mod_base = OTHER; note = 2'-O-methyl-guanosine-3'-phosphorothioate
  modified_base 2: mod_base = OTHER; note = 2'-O-methyl-guanosine-3'-phosphorothioate
  modified_base 3: mod_base = OTHER; note = 2'-O-methyl-adenosine-3'-phosphate
  modified_base 4: mod_base = OTHER; note = 2'-O-methyl-uridine-3'-phosphate
  modified_base 5: mod_base = OTHER; note = 2'-deoxy-2'-fluoro-cytidine-3'-phosphate
  modified_base 6: mod_base = OTHER; note = 2'-O-methyl-uridine-3'-phosphate
  modified_base 7: mod_base = OTHER; note = 2'-deoxy-2'-fluoro-uridine-3'-phosphate
  modified_base 8: mod_base = OTHER; note = 2'-deoxy-2'-fluoro-guanosine-3'-phosphate
  modified_base 9: mod_base = OTHER; note = 2'-deoxy-2'-fluoro-uridine-3'-phosphate
  modified_base 10: mod_base = OTHER; note = 2'-O-methyl-adenosine-3'-phosphate
  modified_base 11: mod_base = OTHER; note = 2'-O-methyl-adenosine-3'-phosphate
  modified_base 12: mod_base = OTHER; note = 2'-O-methyl-adenosine-3'-phosphate
  modified_base 13: mod_base = OTHER; note = 2'-O-methyl-cytidine-3'-phosphate
  modified_base 14: mod_base = OTHER; note = 2'-O-methyl-adenosine-3'-phosphate
  modified_base 15: mod_base = OTHER; note = 2'-O-methyl-uridine-3'-phosphate
  modified_base 16: mod_base = OTHER; note = 2'-O-methyl-guanosine-3'-phosphate
  modified_base 17: mod_base = OTHER; note = 2'-O-methyl-adenosine-3'-phosphate
  modified_base 18: mod_base = OTHER; note = 2'-O-methyl-adenosine-3'-phosphate
  modified_base 19: mod_base = OTHER; note = 2'-O-methyl-adenosine-3'-phosphate
ggatcttgtaaacatgaaa

SEQ ID NO: 1475 - RNA, 19 nt, synthetic construct
  source 1..19: mol_type = other RNA
  modified_base 1: mod_base = OTHER; note = 2'-O-methyl-adenosine-3'-phosphorothioate
  modified_base 2: mod_base = OTHER; note = 2'-O-methyl-cytidine-3'-phosphorothioate
  modified_base 3: mod_base = OTHER; note = 2'-O-methyl-uridine-3'-phosphate
  modified_base 4: mod_base = OTHER; note = 2'-O-methyl-guanosine-3'-phosphate
  modified_base 5: mod_base = OTHER; note = 2'-deoxy-2'-fluoro-uridine-3'-phosphate
  modified_base 6: mod_base = OTHER; note = 2'-O-methyl-uridine-3'-phosphate
  modified_base 7: mod_base = OTHER; note = 2'-deoxy-2'-fluoro-guanosine-3'-phosphate
  modified_base 8: mod_base = OTHER; note = 2'-deoxy-2'-fluoro-adenosine-3'-phosphate
  modified_base 9: mod_base = OTHER; note = 2'-deoxy-2'-fluoro-uridine-3'-phosphate
  modified_base 10: mod_base = OTHER; note = 2'-O-methyl-uridine-3'-phosphate
  modified_base 11: mod_base = OTHER; note = 2'-O-methyl-uridine-3'-phosphate
  modified_base 12: mod_base = OTHER; note = 2'-O-methyl-cytidine-3'-phosphate
  modified_base 13: mod_base = OTHER; note = 2'-O-methyl-cytidine-3'-phosphate
  modified_base 14: mod_base = OTHER; note = 2'-O-methyl-uridine-3'-phosphate
  modified_base 15: mod_base = OTHER; note = 2'-O-methyl-cytidine-3'-phosphate
  modified_base 16: mod_base = OTHER; note = 2'-O-methyl-adenosine-3'-phosphate
  modified_base 17: mod_base = OTHER; note = 2'-O-methyl-adenosine-3'-phosphate
  modified_base 18: mod_base = OTHER; note = 2'-O-methyl-cytidine-3'-phosphate
  modified_base 19: mod_base = OTHER; note = 2'-O-methyl-adenosine-3'-phosphate
actgttgatttcctcaaca

SEQ ID NO: 1476 - RNA, 19 nt, synthetic construct
  source 1..19: mol_type = other RNA
  modified_base 1: mod_base = OTHER; note = 2'-O-methyl-guanosine-3'-phosphorothioate
  modified_base 2: mod_base = OTHER; note = 2'-O-methyl-uridine-3'-phosphorothioate
  modified_base 3: mod_base = OTHER; note = 2'-O-methyl-uridine-3'-phosphate
  modified_base 4: mod_base = OTHER; note = 2'-O-methyl-guanosine-3'-phosphate
  modified_base 5: mod_base = OTHER; note = 2'-deoxy-2'-fluoro-adenosine-3'-phosphate
  modified_base 6: mod_base = OTHER; note = 2'-O-methyl-uridine-3'-phosphate
  modified_base 7: mod_base = OTHER; note = 2'-deoxy-2'-fluoro-uridine-3'-phosphate
  modified_base 8: mod_base = OTHER; note = 2'-deoxy-2'-fluoro-uridine-3'-phosphate
  modified_base 9: mod_base = OTHER; note = 2'-deoxy-2'-fluoro-cytidine-3'-phosphate
  modified_base 10: mod_base = OTHER; note = 2'-O-methyl-cytidine-3'-phosphate
  modified_base 11: mod_base = OTHER; note = 2'-O-methyl-uridine-3'-phosphate
  modified_base 12: mod_base = OTHER; note = 2'-O-methyl-cytidine-3'-phosphate
  modified_base 13: mod_base = OTHER; note = 2'-O-methyl-adenosine-3'-phosphate
  modified_base 14: mod_base = OTHER; note = 2'-O-methyl-adenosine-3'-phosphate
  modified_base 15: mod_base = OTHER; note = 2'-O-methyl-cytidine-3'-phosphate
  modified_base 16: mod_base = OTHER; note = 2'-O-methyl-adenosine-3'-phosphate
  modified_base 17: mod_base = OTHER; note = 2'-O-methyl-uridine-3'-phosphate
  modified_base 18: mod_base = OTHER; note = 2'-O-methyl-guanosine-3'-phosphate
  modified_base 19: mod_base = OTHER; note = 2'-O-methyl-adenosine-3'-phosphate
gttgatttcctcaacatga

SEQ ID NO: 1477 - RNA, 19 nt, synthetic construct
  source 1..19: mol_type = other RNA
  modified_base 1: mod_base = OTHER; note = 2'-O-methyl-uridine-3'-phosphorothioate
  modified_base 2: mod_base = OTHER; note = 2'-O-methyl-guanosine-3'-phosphorothioate
  modified_base 3: mod_base = OTHER; note = 2'-O-methyl-adenosine-3'-phosphate
  modified_base 4: mod_base = OTHER; note = 2'-O-methyl-uridine-3'-phosphate
  modified_base 5: mod_base = OTHER; note = 2'-deoxy-2'-fluoro-uridine-3'-phosphate
  modified_base 6: mod_base = OTHER; note = 2'-O-methyl-uridine-3'-phosphate
  modified_base 7: mod_base = OTHER; note = 2'-deoxy-2'-fluoro-cytidine-3'-phosphate
  modified_base 8: mod_base = OTHER; note = 2'-deoxy-2'-fluoro-cytidine-3'-phosphate
  modified_base 9: mod_base = OTHER; note = 2'-deoxy-2'-fluoro-uridine-3'-phosphate
  modified_base 10: mod_base = OTHER; note = 2'-O-methyl-cytidine-3'-phosphate
  modified_base 11: mod_base = OTHER; note = 2'-O-methyl-adenosine-3'-phosphate
  modified_base 12: mod_base = OTHER; note = 2'-O-methyl-adenosine-3'-phosphate
  modified_base 13: mod_base = OTHER; note = 2'-O-methyl-cytidine-3'-phosphate
  modified_base 14: mod_base = OTHER; note = 2'-O-methyl-adenosine-3'-phosphate
  modified_base 15: mod_base = OTHER; note = 2'-O-methyl-uridine-3'-phosphate
  modified_base 16: mod_base = OTHER; note = 2'-O-methyl-guanosine-3'-phosphate
  modified_base 17: mod_base = OTHER; note = 2'-O-methyl-guanosine-3'-phosphate
  modified_base 18: mod_base = OTHER; note = 2'-O-methyl-cytidine-3'-phosphate
  modified_base 19: mod_base = OTHER; note = 2'-O-methyl-adenosine-3'-phosphate
tgatttcctcaacatggca

SEQ ID NO: 1478 - RNA, 19 nt, synthetic construct
  source 1..19: mol_type = other RNA
  modified_base 1: mod_base = OTHER; note = 2'-O-methyl-guanosine-3'-phosphorothioate
  modified_base 2: mod_base = OTHER; note = 2'-O-methyl-adenosine-3'-phosphorothioate
  modified_base 3: mod_base = OTHER; note = 2'-O-methyl-uridine-3'-phosphate
  modified_base 4: mod_base = OTHER; note = 2'-O-methyl-uridine-3'-phosphate
  modified_base 5: mod_base = OTHER; note = 2'-deoxy-2'-fluoro-uridine-3'-phosphate
  modified_base 6: mod_base = OTHER; note = 2'-O-methyl-cytidine-3'-phosphate
  modified_base 7: mod_base = OTHER; note = 2'-deoxy-2'-fluoro-cytidine-3'-phosphate
  modified_base 8: mod_base = OTHER; note = 2'-deoxy-2'-fluoro-uridine-3'-phosphate
  modified_base 9: mod_base = OTHER; note = 2'-deoxy-2'-fluoro-cytidine-3'-phosphate
  modified_base 10: mod_base = OTHER; note = 2'-O-methyl-adenosine-3'-phosphate
  modified_base 11: mod_base = OTHER; note = 2'-O-methyl-adenosine-3'-phosphate
  modified_base 12: mod_base = OTHER; note = 2'-O-methyl-cytidine-3'-phosphate
  modified_base 13: mod_base = OTHER; note = 2'-O-methyl-adenosine-3'-phosphate
  modified_base 14: mod_base = OTHER; note = 2'-O-methyl-uridine-3'-phosphate
  modified_base 15: mod_base = OTHER; note = 2'-O-methyl-guanosine-3'-phosphate
  modified_base 16: mod_base = OTHER; note = 2'-O-methyl-guanosine-3'-phosphate
  modified_base 17: mod_base = OTHER; note = 2'-O-methyl-cytidine-3'-phosphate
  modified_base 18: mod_base = OTHER; note = 2'-O-methyl-uridine-3'-phosphate
  modified_base 19: mod_base = OTHER; note = 2'-O-methyl-adenosine-3'-phosphate
gatttcctcaacatggcta

SEQ ID NO: 1479 - RNA, 19 nt, synthetic construct
  source 1..19: mol_type = other RNA
  modified_base 1: mod_base = OTHER; note = 2'-O-methyl-adenosine-3'-phosphorothioate
  modified_base 2: mod_base = OTHER; note = 2'-O-methyl-uridine-3'-phosphorothioate
  modified_base 3: mod_base = OTHER; note = 2'-O-methyl-uridine-3'-phosphate
  modified_base 4: mod_base = OTHER; note = 2'-O-methyl-uridine-3'-phosphate
  modified_base 5: mod_base = OTHER; note = 2'-deoxy-2'-fluoro-cytidine-3'-phosphate
  modified_base 6: mod_base = OTHER; note = 2'-O-methyl-cytidine-3'-phosphate
  modified_base 7: mod_base = OTHER; note = 2'-deoxy-2'-fluoro-uridine-3'-phosphate
  modified_base 8: mod_base = OTHER; note = 2'-deoxy-2'-fluoro-cytidine-3'-phosphate
  modified_base 9: mod_base = OTHER; note = 2'-deoxy-2'-fluoro-adenosine-3'-phosphate
  modified_base 10: mod_base = OTHER; note = 2'-O-methyl-adenosine-3'-phosphate
  modified_base 11: mod_base = OTHER; note = 2'-O-methyl-cytidine-3'-phosphate
  modified_base 12: mod_base = OTHER; note = 2'-O-methyl-adenosine-3'-phosphate
  modified_base 13: mod_base = OTHER; note = 2'-O-methyl-uridine-3'-phosphate
  modified_base 14: mod_base = OTHER; note = 2'-O-methyl-guanosine-3'-phosphate
  modified_base 15: mod_base = OTHER; note = 2'-O-methyl-guanosine-3'-phosphate
  modified_base 16: mod_base = OTHER; note = 2'-O-methyl-cytidine-3'-phosphate
  modified_base 17: mod_base = OTHER; note = 2'-O-methyl-uridine-3'-phosphate
  modified_base 18: mod_base = OTHER; note = 2'-O-methyl-cytidine-3'-phosphate
  modified_base 19: mod_base = OTHER; note = 2'-O-methyl-adenosine-3'-phosphate
atttcctcaacatggctca

SEQ ID NO: 1480 - RNA, 19 nt, synthetic construct
  source 1..19: mol_type = other RNA
  modified_base 1: mod_base = OTHER; note = 2'-O-methyl-uridine-3'-phosphorothioate
  modified_base 2: mod_base = OTHER; note = 2'-O-methyl-uridine-3'-phosphorothioate
  modified_base 3: mod_base = OTHER; note = 2'-O-methyl-cytidine-3'-phosphate
  modified_base 4: mod_base = OTHER; note = 2'-O-methyl-cytidine-3'-phosphate
  modified_base 5: mod_base = OTHER; note = 2'-deoxy-2'-fluoro-uridine-3'-phosphate
  modified_base 6: mod_base = OTHER; note = 2'-O-methyl-cytidine-3'-phosphate
  modified_base 7: mod_base = OTHER; note = 2'-deoxy-2'-fluoro-adenosine-3'-phosphate
  modified_base 8: mod_base = OTHER; note = 2'-deoxy-2'-fluoro-adenosine-3'-phosphate
  modified_base 9: mod_base = OTHER; note = 2'-deoxy-2'-fluoro-cytidine-3'-phosphate
  modified_base 10: mod_base = OTHER; note = 2'-O-methyl-adenosine-3'-phosphate
  modified_base 11: mod_base = OTHER; note = 2'-O-methyl-uridine-3'-phosphate
  modified_base 12: mod_base = OTHER; note = 2'-O-methyl-guanosine-3'-phosphate
  modified_base 13: mod_base = OTHER; note = 2'-O-methyl-guanosine-3'-phosphate
  modified_base 14: mod_base = OTHER; note = 2'-O-methyl-cytidine-3'-phosphate
  modified_base 15: mod_base = OTHER; note = 2'-O-methyl-uridine-3'-phosphate
  modified_base 16: mod_base = OTHER; note = 2'-O-methyl-cytidine-3'-phosphate
  modified_base 17: mod_base = OTHER; note = 2'-O-methyl-adenosine-3'-phosphate
  modified_base 18: mod_base = OTHER; note = 2'-O-methyl-cytidine-3'-phosphate
  modified_base 19: mod_base = OTHER; note = 2'-O-methyl-adenosine-3'-phosphate
ttcctcaacatggctcaca

SEQ ID NO: 1481 - RNA, 19 nt, synthetic construct
  source 1..19: mol_type = other RNA
  modified_base 1: mod_base = OTHER; note = 2'-O-methyl-uridine-3'-phosphorothioate
  modified_base 2: mod_base = OTHER; note = 2'-O-methyl-cytidine-3'-phosphorothioate
  modified_base 3: mod_base = OTHER; note = 2'-O-methyl-cytidine-3'-phosphate
  modified_base 4: mod_base = OTHER; note = 2'-O-methyl-uridine-3'-phosphate
  modified_base 5: mod_base = OTHER; note = 2'-deoxy-2'-fluoro-cytidine-3'-phosphate
  modified_base 6: mod_base = OTHER; note = 2'-O-methyl-adenosine-3'-phosphate
  modified_base 7: mod_base = OTHER; note = 2'-deoxy-2'-fluoro-adenosine-3'-phosphate
  modified_base 8: mod_base = OTHER; note = 2'-deoxy-2'-fluoro-cytidine-3'-phosphate
  modified_base 9: mod_base = OTHER; note = 2'-deoxy-2'-fluoro-adenosine-3'-phosphate
  modified_base 10: mod_base = OTHER; note = 2'-O-methyl-uridine-3'-phosphate
  modified_base 11: mod_base = OTHER; note = 2'-O-methyl-guanosine-3'-phosphate
  modified_base 12: mod_base = OTHER; note = 2'-O-methyl-guanosine-3'-phosphate
  modified_base 13: mod_base = OTHER; note = 2'-O-methyl-cytidine-3'-phosphate
  modified_base 14: mod_base = OTHER; note = 2'-O-methyl-uridine-3'-phosphate
  modified_base 15: mod_base = OTHER; note = 2'-O-methyl-cytidine-3'-phosphate
  modified_base 16: mod_base = OTHER; note = 2'-O-methyl-adenosine-3'-phosphate
  modified_base 17: mod_base = OTHER; note = 2'-O-methyl-cytidine-3'-phosphate
  modified_base 18: mod_base = OTHER; note = 2'-O-methyl-adenosine-3'-phosphate
  modified_base 19: mod_base = OTHER; note = 2'-O-methyl-adenosine-3'-phosphate
tcctcaacatggctcacaa

SEQ ID NO: 1482 - RNA, 19 nt, synthetic construct
  source 1..19: mol_type = other RNA
  modified_base 1: mod_base = OTHER; note = 2'-O-methyl-cytidine-3'-phosphorothioate
  modified_base 2: mod_base = OTHER; note = 2'-O-methyl-uridine-3'-phosphorothioate
  modified_base 3: mod_base = OTHER; note = 2'-O-methyl-guanosine-3'-phosphate
  modified_base 4: mod_base = OTHER; note = 2'-O-methyl-cytidine-3'-phosphate
  modified_base 5: mod_base = OTHER; note = 2'-deoxy-2'-fluoro-adenosine-3'-phosphate
  modified_base 6: mod_base = OTHER; note = 2'-O-methyl-cytidine-3'-phosphate
  modified_base 7: mod_base = OTHER; note = 2'-deoxy-2'-fluoro-uridine-3'-phosphate
  modified_base 8: mod_base = OTHER; note = 2'-deoxy-2'-fluoro-guanosine-3'-phosphate
  modified_base 9: mod_base = OTHER; note = 2'-deoxy-2'-fluoro-cytidine-3'-phosphate
  modified_base 10: mod_base = OTHER; note = 2'-O-methyl-cytidine-3'-phosphate
  modified_base 11: mod_base = OTHER; note = 2'-O-methyl-adenosine-3'-phosphate
  modified_base 12: mod_base = OTHER; note = 2'-O-methyl-adenosine-3'-phosphate
  modified_base 13: mod_base = OTHER; note = 2'-O-methyl-cytidine-3'-phosphate
  modified_base 14: mod_base = OTHER; note = 2'-O-methyl-adenosine-3'-phosphate
  modified_base 15: mod_base = OTHER; note = 2'-O-methyl-adenosine-3'-phosphate
  modified_base 16: mod_base = OTHER; note = 2'-O-methyl-guanosine-3'-phosphate
  modified_base 17: mod_base = OTHER; note = 2'-O-methyl-uridine-3'-phosphate
  modified_base 18: mod_base = OTHER; note = 2'-O-methyl-uridine-3'-phosphate
  modified_base 19: mod_base = OTHER; note = 2'-O-methyl-adenosine-3'-phosphate
ctgcactgccaacaagtta

SEQ ID NO: 1483 - RNA, 19 nt, synthetic construct
  source 1..19: mol_type = other RNA
  modified_base 1: mod_base = OTHER; note = 2'-O-methyl-uridine-3'-phosphorothioate
  modified_base 2: mod_base = OTHER; note = 2'-O-methyl-guanosine-3'-phosphorothioate
  modified_base 3: mod_base = OTHER; note = 2'-O-methyl-cytidine-3'-phosphate
  modified_base 4: mod_base = OTHER; note = 2'-O-methyl-adenosine-3'-phosphate
  modified_base 5: mod_base = OTHER; note = 2'-deoxy-2'-fluoro-cytidine-3'-phosphate
  modified_base 6: mod_base = OTHER; note = 2'-O-methyl-uridine-3'-phosphate
  modified_base 7: mod_base = OTHER; note = 2'-deoxy-2'-fluoro-guanosine-3'-phosphate
  modified_base 8: mod_base = OTHER; note = 2'-deoxy-2'-fluoro-cytidine-3'-phosphate
  modified_base 9: mod_base = OTHER; note = 2'-deoxy-2'-fluoro-cytidine-3'-phosphate
  modified_base 10: mod_base = OTHER; note = 2'-O-methyl-adenosine-3'-phosphate
  modified_base 11: mod_base = OTHER; note = 2'-O-methyl-adenosine-3'-phosphate
  modified_base 12: mod_base = OTHER; note = 2'-O-methyl-cytidine-3'-phosphate
  modified_base 13: mod_base = OTHER; note = 2'-O-methyl-adenosine-3'-phosphate
  modified_base 14: mod_base = OTHER; note = 2'-O-methyl-adenosine-3'-phosphate
  modified_base 15: mod_base = OTHER; note = 2'-O-methyl-guanosine-3'-phosphate
  modified_base 16: mod_base = OTHER; note = 2'-O-methyl-uridine-3'-phosphate
  modified_base 17: mod_base = OTHER; note = 2'-O-methyl-uridine-3'-phosphate
  modified_base 18: mod_base = OTHER; note = 2'-O-methyl-cytidine-3'-phosphate
  modified_base 19: mod_base = OTHER; note = 2'-O-methyl-adenosine-3'-phosphate
tgcactgccaacaagttca

SEQ ID NO: 1484 - RNA, 19 nt, synthetic construct
  source 1..19: mol_type = other RNA
  modified_base 1: mod_base = OTHER; note = 2'-O-methyl-cytidine-3'-phosphorothioate
  modified_base 2: mod_base = OTHER; note = 2'-O-methyl-adenosine-3'-phosphorothioate
  modified_base 3: mod_base = OTHER; note = 2'-O-methyl-cytidine-3'-phosphate
  modified_base 4: mod_base = OTHER; note = 2'-O-methyl-uridine-3'-phosphate
  modified_base 5: mod_base = OTHER; note = 2'-deoxy-2'-fluoro-guanosine-3'-phosphate
  modified_base 6: mod_base = OTHER; note = 2'-O-methyl-cytidine-3'-phosphate
  modified_base 7: mod_base = OTHER; note = 2'-deoxy-2'-fluoro-cytidine-3'-phosphate
  modified_base 8: mod_base = OTHER; note = 2'-deoxy-2'-fluoro-adenosine-3'-phosphate
  modified_base 9: mod_base = OTHER; note = 2'-deoxy-2'-fluoro-adenosine-3'-phosphate
  modified_base 10: mod_base = OTHER; note = 2'-O-methyl-cytidine-3'-phosphate
  modified_base 11: mod_base = OTHER; note = 2'-O-methyl-adenosine-3'-phosphate
  modified_base 12: mod_base = OTHER; note = 2'-O-methyl-adenosine-3'-phosphate
  modified_base 13: mod_base = OTHER; note = 2'-O-methyl-guanosine-3'-phosphate
  modified_base 14: mod_base = OTHER; note = 2'-O-methyl-uridine-3'-phosphate
  modified_base 15: mod_base = OTHER; note = 2'-O-methyl-uridine-3'-phosphate
  modified_base 16: mod_base = OTHER; note = 2'-O-methyl-cytidine-3'-phosphate
  modified_base 17: mod_base = OTHER; note = 2'-O-methyl-adenosine-3'-phosphate
  modified_base 18: mod_base = OTHER; note = 2'-O-methyl-cytidine-3'-phosphate
  modified_base 19: mod_base = OTHER; note = 2'-O-methyl-adenosine-3'-phosphate
cactgccaacaagttcaca

SEQ ID NO: 1485 - RNA, 19 nt, synthetic construct
  source 1..19: mol_type = other RNA
  modified_base 1: mod_base = OTHER; note = 2'-O-methyl-adenosine-3'-phosphorothioate
  modified_base 2: mod_base = OTHER; note = 2'-O-methyl-cytidine-3'-phosphorothioate
  modified_base 3: mod_base = OTHER; note = 2'-O-methyl-uridine-3'-phosphate
  modified_base 4: mod_base = OTHER; note = 2'-O-methyl-guanosine-3'-phosphate
  modified_base 5: mod_base = OTHER; note = 2'-deoxy-2'-fluoro-cytidine-3'-phosphate
  modified_base 6: mod_base = OTHER; note = 2'-O-methyl-cytidine-3'-phosphate
  modified_base 7: mod_base = OTHER; note = 2'-deoxy-2'-fluoro-adenosine-3'-phosphate
  modified_base 8: mod_base = OTHER; note = 2'-deoxy-2'-fluoro-adenosine-3'-phosphate
  modified_base 9: mod_base = OTHER; note = 2'-deoxy-2'-fluoro-cytidine-3'-phosphate
  modified_base 10: mod_base = OTHER; note = 2'-O-methyl-adenosine-3'-phosphate
  modified_base 11: mod_base = OTHER; note = 2'-O-methyl-adenosine-3'-phosphate
  modified_base 12: mod_base = OTHER; note = 2'-O-methyl-guanosine-3'-phosphate
  modified_base 13: mod_base = OTHER; note = 2'-O-methyl-uridine-3'-phosphate
  modified_base 14: mod_base = OTHER; note = 2'-O-methyl-uridine-3'-phosphate
  modified_base 15: mod_base = OTHER; note = 2'-O-methyl-cytidine-3'-phosphate
  modified_base 16: mod_base = OTHER; note = 2'-O-methyl-adenosine-3'-phosphate
  modified_base 17: mod_base = OTHER; note = 2'-O-methyl-cytidine-3'-phosphate
  modified_base 18: mod_base = OTHER; note = 2'-O-methyl-uridine-3'-phosphate
  modified_base 19: mod_base = OTHER; note = 2'-O-methyl-adenosine-3'-phosphate
actgccaacaagttcacta

SEQ ID NO: 1486 - RNA, 19 nt, synthetic construct
  source 1..19: mol_type = other RNA
  modified_base 1: mod_base = OTHER; note = 2'-O-methyl-cytidine-3'-phosphorothioate
  modified_base 2: mod_base = OTHER; note = 2'-O-methyl-uridine-3'-phosphorothioate
  modified_base 3: mod_base = OTHER; note = 2'-O-methyl-guanosine-3'-phosphate
  modified_base 4: mod_base = OTHER; note = 2'-O-methyl-cytidine-3'-phosphate
  modified_base 5: mod_base = OTHER; note = 2'-deoxy-2'-fluoro-cytidine-3'-phosphate
  modified_base 6: mod_base = OTHER; note = 2'-O-methyl-adenosine-3'-phosphate
  modified_base 7: mod_base = OTHER; note = 2'-deoxy-2'-fluoro-adenosine-3'-phosphate
  modified_base 8: mod_base = OTHER; note = 2'-deoxy-2'-fluoro-cytidine-3'-phosphate
  modified_base 9: mod_base = OTHER; note = 2'-deoxy-2'-fluoro-adenosine-3'-phosphate
  modified_base 10: mod_base = OTHER; note = 2'-O-methyl-adenosine-3'-phosphate
  modified_base 11: mod_base = OTHER; note = 2'-O-methyl-guanosine-3'-phosphate
  modified_base 12: mod_base = OTHER; note = 2'-O-methyl-uridine-3'-phosphate
  modified_base 13: mod_base = OTHER; note = 2'-O-methyl-uridine-3'-phosphate
  modified_base 14: mod_base = OTHER; note = 2'-O-methyl-cytidine-3'-phosphate
  modified_base 15: mod_base = OTHER; note = 2'-O-methyl-adenosine-3'-phosphate
  modified_base 16: mod_base = OTHER; note = 2'-O-methyl-cytidine-3'-phosphate
  modified_base 17: mod_base = OTHER; note = 2'-O-methyl-uridine-3'-phosphate
  modified_base 18: mod_base = OTHER; note = 2'-O-methyl-uridine-3'-phosphate
  modified_base 19: mod_base = OTHER; note = 2'-O-methyl-adenosine-3'-phosphate
ctgccaacaagttcactta

SEQ ID NO: 1487 - RNA, 19 nt, synthetic construct
  source 1..19: mol_type = other RNA
  modified_base 1: mod_base = OTHER; note = 2'-O-methyl-cytidine-3'-phosphorothioate
  modified_base 2: mod_base = OTHER; note = 2'-O-methyl-cytidine-3'-phosphorothioate
  modified_base 3: mod_base = OTHER; note = 2'-O-methyl-adenosine-3'-phosphate
  modified_base 4: mod_base = OTHER; note = 2'-O-methyl-adenosine-3'-phosphate
  modified_base 5: mod_base = OTHER; note = 2'-deoxy-2'-fluoro-cytidine-3'-phosphate
  modified_base 6: mod_base = OTHER; note = 2'-O-methyl-adenosine-3'-phosphate
  modified_base 7: mod_base = OTHER; note = 2'-deoxy-2'-fluoro-adenosine-3'-phosphate
  modified_base 8: mod_base = OTHER; note = 2'-deoxy-2'-fluoro-guanosine-3'-phosphate
  modified_base 9: mod_base = OTHER; note = 2'-deoxy-2'-fluoro-uridine-3'-phosphate
  modified_base 10: mod_base = OTHER; note = 2'-O-methyl-uridine-3'-phosphate
  modified_base 11: mod_base = OTHER; note = 2'-O-methyl-cytidine-3'-phosphate
  modified_base 12: mod_base = OTHER; note = 2'-O-methyl-adenosine-3'-phosphate
  modified_base 13: mod_base = OTHER; note = 2'-O-methyl-cytidine-3'-phosphate
  modified_base 14: mod_base = OTHER; note = 2'-O-methyl-uridine-3'-phosphate
  modified_base 15: mod_base = OTHER; note = 2'-O-methyl-uridine-3'-phosphate
  modified_base 16: mod_base = OTHER; note = 2'-O-methyl-cytidine-3'-phosphate
  modified_base 17: mod_base = OTHER; note = 2'-O-methyl-adenosine-3'-phosphate
  modified_base 18: mod_base = OTHER; note = 2'-O-methyl-uridine-3'-phosphate
  modified_base 19: mod_base = OTHER; note = 2'-O-methyl-adenosine-3'-phosphate
ccaacaagttcacttcata

SEQ ID NO: 1488 - RNA, 19 nt, synthetic construct
  source 1..19: mol_type = other RNA
  modified_base 1: mod_base = OTHER; note = 2'-O-methyl-cytidine-3'-phosphorothioate
  modified_base 2: mod_base = OTHER; note = 2'-O-methyl-adenosine-3'-phosphorothioate
  modified_base 3: mod_base = OTHER; note = 2'-O-methyl-adenosine-3'-phosphate
  modified_base 4: mod_base = OTHER; note = 2'-O-methyl-cytidine-3'-phosphate
  modified_base 5: mod_base = OTHER; note = 2'-deoxy-2'-fluoro-adenosine-3'-phosphate
  modified_base 6: mod_base = OTHER; note = 2'-O-methyl-adenosine-3'-phosphate
  modified_base 7: mod_base = OTHER; note = 2'-deoxy-2'-fluoro-guanosine-3'-phosphate
  modified_base 8: mod_base = OTHER; note = 2'-deoxy-2'-fluoro-uridine-3'-phosphate
  modified_base 9: mod_base = OTHER; note = 2'-deoxy-2'-fluoro-uridine-3'-phosphate
  modified_base 10: mod_base = OTHER; note = 2'-O-methyl-cytidine-3'-phosphate
  modified_base 11: mod_base = OTHER; note = 2'-O-methyl-adenosine-3'-phosphate
  modified_base 12: mod_base = OTHER; note = 2'-O-methyl-cytidine-3'-phosphate
  modified_base 13: mod_base = OTHER; note = 2'-O-methyl-uridine-3'-phosphate
  modified_base 14: mod_base = OTHER; note = 2'-O-methyl-uridine-3'-phosphate
  modified_base 15: mod_base = OTHER; note = 2'-O-methyl-cytidine-3'-phosphate
  modified_base 16: mod_base = OTHER; note = 2'-O-methyl-adenosine-3'-phosphate
  modified_base 17: mod_base = OTHER; note = 2'-O-methyl-uridine-3'-phosphate
  modified_base 18: mod_base = OTHER; note = 2'-O-methyl-adenosine-3'-phosphate
  modified_base 19: mod_base = OTHER; note = 2'-O-methyl-adenosine-3'-phosphate
caacaagttcacttcataa

SEQ ID NO: 1489 - RNA, 19 nt, synthetic construct
  source 1..19: mol_type = other RNA
  modified_base 1: mod_base = OTHER; note = 2'-O-methyl-adenosine-3'-phosphorothioate
  modified_base 2: mod_base = OTHER; note = 2'-O-methyl-adenosine-3'-phosphorothioate
  modified_base 3: mod_base = OTHER; note = 2'-O-methyl-cytidine-3'-phosphate
  modified_base 4: mod_base = OTHER; note = 2'-O-methyl-adenosine-3'-phosphate
  modified_base 5: mod_base = OTHER; note = 2'-deoxy-2'-fluoro-adenosine-3'-phosphate
  modified_base 6: mod_base = OTHER; note = 2'-O-methyl-guanosine-3'-phosphate
  modified_base 7: mod_base = OTHER; note = 2'-deoxy-2'-fluoro-uridine-3'-phosphate
  modified_base 8: mod_base = OTHER; note = 2'-deoxy-2'-fluoro-uridine-3'-phosphate
  modified_base 9: mod_base = OTHER; note = 2'-deoxy-2'-fluoro-cytidine-3'-phosphate
  modified_base 10: mod_base = OTHER; note = 2'-O-methyl-adenosine-3'-phosphate
  modified_base 11: mod_base = OTHER; note = 2'-O-methyl-cytidine-3'-phosphate
  modified_base 12: mod_base = OTHER; note = 2'-O-methyl-uridine-3'-phosphate
  modified_base 13: mod_base = OTHER; note = 2'-O-methyl-uridine-3'-phosphate
  modified_base 14: mod_base = OTHER; note = 2'-O-methyl-cytidine-3'-phosphate
  modified_base 15: mod_base = OTHER; note = 2'-O-methyl-adenosine-3'-phosphate
  modified_base 16: mod_base = OTHER; note = 2'-O-methyl-uridine-3'-phosphate
  modified_base 17: mod_base = OTHER; note = 2'-O-methyl-adenosine-3'-phosphate
  modified_base 18: mod_base = OTHER; note = 2'-O-methyl-uridine-3'-phosphate
  modified_base 19: mod_base = OTHER; note = 2'-O-methyl-adenosine-3'-phosphate
aacaagttcacttcatata

SEQ ID NO: 1490 - RNA, 19 nt, synthetic construct
  source 1..19: mol_type = other RNA
  modified_base 1: mod_base = OTHER; note = 2'-O-methyl-adenosine-3'-phosphorothioate
  modified_base 2: mod_base = OTHER; note = 2'-O-methyl-cytidine-3'-phosphorothioate
  modified_base 3: mod_base = OTHER; note = 2'-O-methyl-adenosine-3'-phosphate
  modified_base 4: mod_base = OTHER; note = 2'-O-methyl-adenosine-3'-phosphate
  modified_base 5: mod_base = OTHER; note = 2'-deoxy-2'-fluoro-guanosine-3'-phosphate
  modified_base 6: mod_base = OTHER; note = 2'-O-methyl-uridine-3'-phosphate
  modified_base 7: mod_base = OTHER; note = 2'-deoxy-2'-fluoro-uridine-3'-phosphate
  modified_base 8: mod_base = OTHER; note = 2'-deoxy-2'-fluoro-cytidine-3'-phosphate
  modified_base 9: mod_base = OTHER; note = 2'-deoxy-2'-fluoro-adenosine-3'-phosphate
  modified_base 10: mod_base = OTHER; note = 2'-O-methyl-cytidine-3'-phosphate
  modified_base 11: mod_base = OTHER; note = 2'-O-methyl-uridine-3'-phosphate
  modified_base 12: mod_base = OTHER; note = 2'-O-methyl-uridine-3'-phosphate
  modified_base 13: mod_base = OTHER; note = 2'-O-methyl-cytidine-3'-phosphate
  modified_base 14: mod_base = OTHER; note = 2'-O-methyl-adenosine-3'-phosphate
  modified_base 15: mod_base = OTHER; note = 2'-O-methyl-uridine-3'-phosphate
  modified_base 16: mod_base = OTHER; note = 2'-O-methyl-adenosine-3'-phosphate
  modified_base 17: mod_base = OTHER; note = 2'-O-methyl-uridine-3'-phosphate
  modified_base 18: mod_base = OTHER; note = 2'-O-methyl-adenosine-3'-phosphate
  modified_base 19: mod_base = OTHER; note = 2'-O-methyl-adenosine-3'-phosphate
acaagttcacttcatataa

SEQ ID NO: 1491 - RNA, 19 nt, synthetic construct
  source 1..19: mol_type = other RNA
  modified_base 1: mod_base = OTHER; note = 2'-O-methyl-adenosine-3'-phosphorothioate
  modified_base 2: mod_base = OTHER; note = 2'-O-methyl-cytidine-3'-phosphorothioate
  modified_base 3: mod_base = OTHER; note = 2'-O-methyl-uridine-3'-phosphate
  modified_base 4: mod_base = OTHER; note = 2'-O-methyl-uridine-3'-phosphate
  modified_base 5: mod_base = OTHER; note = 2'-deoxy-2'-fluoro-cytidine-3'-phosphate
  modified_base 6: mod_base = OTHER; note = 2'-O-methyl-adenosine-3'-phosphate
  modified_base 7: mod_base = OTHER; note = 2'-deoxy-2'-fluoro-uridine-3'-phosphate
  modified_base 8: mod_base = OTHER; note = 2'-deoxy-2'-fluoro-adenosine-3'-phosphate
  modified_base 9: mod_base = OTHER; note = 2'-deoxy-2'-fluoro-uridine-3'-phosphate
  modified_base 10: mod_base = OTHER; note = 2'-O-methyl-adenosine-3'-phosphate
  modified_base 11: mod_base = OTHER; note = 2'-O-methyl-uridine-3'-phosphate
  modified_base 12: mod_base = OTHER; note = 2'-O-methyl-adenosine-3'-phosphate
  modified_base 13: mod_base = OTHER; note = 2'-O-methyl-adenosine-3'-phosphate
  modified_base 14: mod_base = OTHER; note = 2'-O-methyl-adenosine-3'-phosphate
  modified_base 15: mod_base = OTHER; note = 2'-O-methyl-guanosine-3'-phosphate
  modified_base 16: mod_base = OTHER; note = 2'-O-methyl-cytidine-3'-phosphate
  modified_base 17: mod_base = OTHER; note = 2'-O-methyl-adenosine-3'-phosphate
  modified_base 18: mod_base = OTHER; note = 2'-O-methyl-uridine-3'-phosphate
  modified_base 19: mod_base = OTHER; note = 2'-O-methyl-adenosine-3'-phosphate
acttcatatataaagcata

SEQ ID NO: 1492 - RNA, 19 nt, synthetic construct
  source 1..19: mol_type = other RNA
  modified_base 1: mod_base = OTHER; note = 2'-O-methyl-guanosine-3'-phosphorothioate
  modified_base 2: mod_base = OTHER; note = 2'-O-methyl-uridine-3'-phosphorothioate
  modified_base 3: mod_base = OTHER; note = 2'-O-methyl-cytidine-3'-phosphate
  modified_base 4: mod_base = OTHER; note = 2'-O-methyl-uridine-3'-phosphate
  modified_base 5: mod_base = OTHER; note = 2'-deoxy-2'-fluoro-uridine-3'-phosphate
  modified_base 6: mod_base = OTHER; note = 2'-O-methyl-cytidine-3'-phosphate
  modified_base 7: mod_base = OTHER; note = 2'-deoxy-2'-fluoro-adenosine-3'-phosphate
  modified_base 8: mod_base = OTHER; note = 2'-deoxy-2'-fluoro-cytidine-3'-phosphate
  modified_base 9: mod_base = OTHER; note = 2'-deoxy-2'-fluoro-cytidine-3'-phosphate
  modified_base 10: mod_base = OTHER; note = 2'-O-methyl-adenosine-3'-phosphate
  modified_base 11: mod_base = OTHER; note = 2'-O-methyl-adenosine-3'-phosphate
  modified_base 12: mod_base = OTHER; note = 2'-O-methyl-guanosine-3'-phosphate
  modified_base 13: mod_base = OTHER; note = 2'-O-methyl-uridine-3'-phosphate
  modified_base 14: mod_base = OTHER; note = 2'-O-methyl-adenosine-3'-phosphate
  modified_base 15: mod_base = OTHER; note = 2'-O-methyl-uridine-3'-phosphate
  modified_base 16: mod_base = OTHER; note = 2'-O-methyl-cytidine-3'-phosphate
  modified_base 17: mod_base = OTHER; note = 2'-O-methyl-adenosine-3'-phosphate
  modified_base 18: mod_base = OTHER; note = 2'-O-methyl-adenosine-3'-phosphate
  modified_base 19: mod_base = OTHER; note = 2'-O-methyl-adenosine-3'-phosphate
gtcttcaccaagtatcaaa

SEQ ID NO: 1493 - RNA, 19 nt, synthetic construct
  source 1..19: mol_type = other RNA
  modified_base 1: mod_base = OTHER; note = 2'-O-methyl-uridine-3'-phosphorothioate
  modified_base 2: mod_base = OTHER; note = 2'-O-methyl-cytidine-3'-phosphorothioate
  modified_base 3: mod_base = OTHER; note = 2'-O-methyl-uridine-3'-phosphate
  modified_base 4: mod_base = OTHER; note = 2'-O-methyl-uridine-3'-phosphate
  modified_base 5: mod_base = OTHER; note = 2'-deoxy-2'-fluoro-cytidine-3'-phosphate
  modified_base 6: mod_base = OTHER; note = 2'-O-methyl-adenosine-3'-phosphate
  modified_base 7: mod_base = OTHER; note = 2'-deoxy-2'-fluoro-cytidine-3'-phosphate
  modified_base 8: mod_base = OTHER; note = 2'-deoxy-2'-fluoro-cytidine-3'-phosphate
  modified_base 9: mod_base = OTHER; note = 2'-deoxy-2'-fluoro-adenosine-3'-phosphate
  modified_base 10: mod_base = OTHER; note = 2'-O-methyl-adenosine-3'-phosphate
  modified_base 11: mod_base = OTHER; note = 2'-O-methyl-guanosine-3'-phosphate
  modified_base 12: mod_base = OTHER; note = 2'-O-methyl-uridine-3'-phosphate
  modified_base 13: mod_base = OTHER; note = 2'-O-methyl-adenosine-3'-phosphate
  modified_base 14: mod_base = OTHER; note = 2'-O-methyl-uridine-3'-phosphate
  modified_base 15: mod_base = OTHER; note = 2'-O-methyl-cytidine-3'-phosphate
  modified_base 16: mod_base = OTHER; note = 2'-O-methyl-adenosine-3'-phosphate
  modified_base 17: mod_base = OTHER; note = 2'-O-methyl-adenosine-3'-phosphate
  modified_base 18: mod_base = OTHER; note = 2'-O-methyl-adenosine-3'-phosphate
  modified_base 19: mod_base = OTHER; note = 2'-O-methyl-adenosine-3'-phosphate
tcttcaccaagtatcaaaa

SEQ ID NO: 1494 - RNA, 19 nt, synthetic construct
  source 1..19: mol_type = other RNA
  modified_base 1: mod_base = OTHER; note = 2'-O-methyl-cytidine-3'-phosphorothioate
  modified_base 2: mod_base = OTHER; note = 2'-O-methyl-uridine-3'-phosphorothioate
  modified_base 3: mod_base = OTHER; note = 2'-O-methyl-uridine-3'-phosphate
  modified_base 4: mod_base = OTHER; note = 2'-O-methyl-cytidine-3'-phosphate
  modified_base 5: mod_base = OTHER; note = 2'-deoxy-2'-fluoro-adenosine-3'-phosphate
  modified_base 6: mod_base = OTHER; note = 2'-O-methyl-cytidine-3'-phosphate
  modified_base 7: mod_base = OTHER; note = 2'-deoxy-2'-fluoro-cytidine-3'-phosphate
  modified_base 8: mod_base = OTHER; note = 2'-deoxy-2'-fluoro-adenosine-3'-phosphate
  modified_base 9: mod_base = OTHER; note = 2'-deoxy-2'-fluoro-adenosine-3'-phosphate
  modified_base 10: mod_base = OTHER; note = 2'-O-methyl-guanosine-3'-phosphate
  modified_base 11: mod_base = OTHER; note = 2'-O-methyl-uridine-3'-phosphate
  modified_base 12: mod_base = OTHER; note = 2'-O-methyl-adenosine-3'-phosphate
  modified_base 13: mod_base = OTHER; note = 2'-O-methyl-uridine-3'-phosphate
  modified_base 14: mod_base = OTHER; note = 2'-O-methyl-cytidine-3'-phosphate
  modified_base 15: mod_base = OTHER; note = 2'-O-methyl-adenosine-3'-phosphate
  modified_base 16: mod_base = OTHER; note = 2'-O-methyl-adenosine-3'-phosphate
  modified_base 17: mod_base = OTHER; note = 2'-O-methyl-adenosine-3'-phosphate
  modified_base 18: mod_base = OTHER; note = 2'-O-methyl-guanosine-3'-phosphate
  modified_base 19: mod_base = OTHER; note = 2'-O-methyl-adenosine-3'-phosphate
cttcaccaagtatcaaaga

SEQ ID NO: 1495 - RNA, 19 nt, synthetic construct
  source 1..19: mol_type = other RNA
  modified_base 1: mod_base = OTHER; note = 2'-O-methyl-uridine-3'-phosphorothioate
  modified_base 2: mod_base = OTHER; note = 2'-O-methyl-uridine-3'-phosphorothioate
  modified_base 3: mod_base = OTHER; note = 2'-O-methyl-cytidine-3'-phosphate
  modified_base 4: mod_base = OTHER; note = 2'-O-methyl-adenosine-3'-phosphate
  modified_base 5: mod_base = OTHER; note = 2'-deoxy-2'-fluoro-cytidine-3'-phosphate
  modified_base 6: mod_base = OTHER; note = 2'-O-methyl-cytidine-3'-phosphate
  modified_base 7: mod_base = OTHER; note = 2'-deoxy-2'-fluoro-adenosine-3'-phosphate
  modified_base 8: mod_base = OTHER; note = 2'-deoxy-2'-fluoro-adenosine-3'-phosphate
  modified_base 9: mod_base = OTHER; note = 2'-deoxy-2'-fluoro-guanosine-3'-phosphate
  modified_base 10: mod_base = OTHER; note = 2'-O-methyl-uridine-3'-phosphate
  modified_base 11: mod_base = OTHER; note = 2'-O-methyl-adenosine-3'-phosphate
  modified_base 12: mod_base = OTHER; note = 2'-O-methyl-uridine-3'-phosphate
  modified_base 13: mod_base = OTHER; note = 2'-O-methyl-cytidine-3'-phosphate
  modified_base 14: mod_base = OTHER; note = 2'-O-methyl-adenosine-3'-phosphate
  modified_base 15: mod_base = OTHER; note = 2'-O-methyl-adenosine-3'-phosphate
  modified_base 16: mod_base = OTHER; note = 2'-O-methyl-adenosine-3'-phosphate
  modified_base 17: mod_base = OTHER; note = 2'-O-methyl-guanosine-3'-phosphate
  modified_base 18: mod_base = OTHER; note = 2'-O-methyl-uridine-3'-phosphate
  modified_base 19: mod_base = OTHER; note = 2'-O-methyl-adenosine-3'-phosphate
ttcaccaagtatcaaagta

SEQ ID NO: 1496 - RNA, 19 nt, synthetic construct
  source 1..19: mol_type = other RNA
  modified_base 1: mod_base = OTHER; note = 2'-O-methyl-cytidine-3'-phosphorothioate
  modified_base 2: mod_base = OTHER; note = 2'-O-methyl-adenosine-3'-phosphorothioate
  modified_base 3: mod_base = OTHER; note = 2'-O-methyl-cytidine-3'-phosphate
  modified_base 4: mod_base = OTHER; note = 2'-O-methyl-cytidine-3'-phosphate
  modified_base 5: mod_base = OTHER; note = 2'-deoxy-2'-fluoro-adenosine-3'-phosphate
  modified_base 6: mod_base = OTHER; note = 2'-O-methyl-adenosine-3'-phosphate
  modified_base 7: mod_base = OTHER; note = 2'-deoxy-2'-fluoro-guanosine-3'-phosphate
  modified_base 8: mod_base = OTHER; note = 2'-deoxy-2'-fluoro-uridine-3'-phosphate
  modified_base 9: mod_base = OTHER; note = 2'-deoxy-2'-fluoro-adenosine-3'-phosphate
  modified_base 10: mod_base = OTHER; note = 2'-O-methyl-uridine-3'-phosphate
  modified_base 11: mod_base = OTHER; note = 2'-O-methyl-cytidine-3'-phosphate
  modified_base 12: mod_base = OTHER; note = 2'-O-methyl-adenosine-3'-phosphate
  modified_base 13: mod_base = OTHER; note = 2'-O-methyl-adenosine-3'-phosphate
  modified_base 14: mod_base = OTHER; note = 2'-O-methyl-adenosine-3'-phosphate
  modified_base 15: mod_base = OTHER; note = 2'-O-methyl-guanosine-3'-phosphate
  modified_base 16: mod_base = OTHER; note = 2'-O-methyl-uridine-3'-phosphate
  modified_base 17: mod_base = OTHER; note = 2'-O-methyl-adenosine-3'-phosphate
  modified_base 18: mod_base = OTHER; note = 2'-O-methyl-adenosine-3'-phosphate
  modified_base 19: mod_base = OTHER; note = 2'-O-methyl-adenosine-3'-phosphate
caccaagtatcaaagtaaa

SEQ ID NO: 1497 - RNA, 19 nt, synthetic construct
  source 1..19: mol_type = other RNA
  modified_base 1: mod_base = OTHER; note = 2'-O-methyl-cytidine-3'-phosphorothioate
  modified_base 2: mod_base = OTHER; note = 2'-O-methyl-adenosine-3'-phosphorothioate
  modified_base 3: mod_base = OTHER; note = 2'-O-methyl-adenosine-3'-phosphate
  modified_base 4: mod_base = OTHER; note = 2'-O-methyl-guanosine-3'-phosphate
  modified_base 5: mod_base = OTHER; note = 2'-deoxy-2'-fluoro-uridine-3'-phosphate
  modified_base 6: mod_base = OTHER; note = 2'-O-methyl-adenosine-3'-phosphate
  modified_base 7: mod_base = OTHER; note = 2'-deoxy-2'-fluoro-uridine-3'-phosphate
  modified_base 8: mod_base = OTHER; note = 2'-deoxy-2'-fluoro-cytidine-3'-phosphate
  modified_base 9: mod_base = OTHER; note = 2'-deoxy-2'-fluoro-adenosine-3'-phosphate
  modified_base 10: mod_base = OTHER; note = 2'-O-methyl-adenosine-3'-phosphate
  modified_base 11: mod_base = OTHER; note = 2'-O-methyl-adenosine-3'-phosphate
  modified_base 12: mod_base = OTHER; note = 2'-O-methyl-guanosine-3'-phosphate
  modified_base 13: mod_base = OTHER; note = 2'-O-methyl-uridine-3'-phosphate
  modified_base 14: mod_base = OTHER; note = 2'-O-methyl-adenosine-3'-phosphate
  modified_base 15: mod_base = OTHER; note = 2'-O-methyl-adenosine-3'-phosphate
  modified_base 16: mod_base = OTHER; note = 2'-O-methyl-uridine-3'-phosphate
  modified_base 17: mod_base = OTHER; note = 2'-O-methyl-adenosine-3'-phosphate
  modified_base 18: mod_base = OTHER; note = 2'-O-methyl-adenosine-3'-phosphate
  modified_base 19: mod_base = OTHER; note = 2'-O-methyl-adenosine-3'-phosphate
caagtatcaaagtaataaa

SEQ ID NO: 1498 - RNA, 19 nt, synthetic construct
  source 1..19: mol_type = other RNA
  modified_base 1: mod_base = OTHER; note = 2'-O-methyl-adenosine-3'-phosphorothioate
  modified_base 2: mod_base = OTHER; note = 2'-O-methyl-adenosine-3'-phosphorothioate
  modified_base 3: mod_base = OTHER; note = 2'-O-methyl-guanosine-3'-phosphate
  modified_base 4: mod_base = OTHER; note = 2'-O-methyl-uridine-3'-phosphate
  modified_base 5: mod_base = OTHER; note = 2'-deoxy-2'-fluoro-adenosine-3'-phosphate
  modified_base 6: mod_base = OTHER; note = 2'-O-methyl-uridine-3'-phosphate
  modified_base 7: mod_base = OTHER; note = 2'-deoxy-2'-fluoro-cytidine-3'-phosphate
  modified_base 8: mod_base = OTHER; note = 2'-deoxy-2'-fluoro-adenosine-3'-phosphate
  modified_base 9: mod_base = OTHER; note = 2'-deoxy-2'-fluoro-adenosine-3'-phosphate
  modified_base 10: mod_base = OTHER; note = 2'-O-methyl-adenosine-3'-phosphate
  modified_base 11: mod_base = OTHER; note = 2'-O-methyl-guanosine-3'-phosphate
  modified_base 12: mod_base = OTHER; note = 2'-O-methyl-uridine-3'-phosphate
  modified_base 13: mod_base = OTHER; note = 2'-O-methyl-adenosine-3'-phosphate
  modified_base 14: mod_base = OTHER; note = 2'-O-methyl-adenosine-3'-phosphate
  modified_base 15: mod_base = OTHER; note = 2'-O-methyl-uridine-3'-phosphate
  modified_base 16: mod_base = OTHER; note = 2'-O-methyl-adenosine-3'-phosphate
  modified_base 17: mod_base = OTHER; note = 2'-O-methyl-adenosine-3'-phosphate
  modified_base 18: mod_base = OTHER; note = 2'-O-methyl-cytidine-3'-phosphate
  modified_base 19: mod_base = OTHER; note = 2'-O-methyl-adenosine-3'-phosphate
aagtatcaaagtaataaca

SEQ ID NO: 1499 - RNA, 19 nt, synthetic construct
  source 1..19: mol_type = other RNA
  modified_base 1: mod_base = OTHER; note = 2'-O-methyl-adenosine-3'-phosphorothioate
  modified_base 2: mod_base = OTHER; note = 2'-O-methyl-guanosine-3'-phosphorothioate
  modified_base 3: mod_base = OTHER; note = 2'-O-methyl-uridine-3'-phosphate
  modified_base 4: mod_base = OTHER; note = 2'-O-methyl-adenosine-3'-phosphate
  modified_base 5: mod_base = OTHER; note = 2'-deoxy-2'-fluoro-uridine-3'-phosphate
  modified_base 6: mod_base = OTHER; note = 2'-O-methyl-cytidine-3'-phosphate
  modified_base 7: mod_base = OTHER; note = 2'-deoxy-2'-fluoro-adenosine-3'-phosphate
  modified_base 8: mod_base = OTHER; note = 2'-deoxy-2'-fluoro-adenosine-3'-phosphate
  modified_base 9: mod_base = OTHER; note = 2'-deoxy-2'-fluoro-adenosine-3'-phosphate
  modified_base 10: mod_base = OTHER; note = 2'-O-methyl-guanosine-3'-phosphate
  modified_base 11: mod_base = OTHER; note = 2'-O-methyl-uridine-3'-phosphate
  modified_base 12: mod_base = OTHER; note = 2'-O-methyl-adenosine-3'-phosphate
  modified_base 13: mod_base = OTHER; note = 2'-O-methyl-adenosine-3'-phosphate
  modified_base 14: mod_base = OTHER; note = 2'-O-methyl-uridine-3'-phosphate
  modified_base 15: mod_base = OTHER; note = 2'-O-methyl-adenosine-3'-phosphate
  modified_base 16: mod_base = OTHER; note = 2'-O-methyl-adenosine-3'-phosphate
  modified_base 17: mod_base = OTHER; note = 2'-O-methyl-cytidine-3'-phosphate
  modified_base 18: mod_base = OTHER; note = 2'-O-methyl-adenosine-3'-phosphate
  modified_base 19: mod_base = OTHER; note = 2'-O-methyl-adenosine-3'-phosphate
agtatcaaagtaataacaa

SEQ ID NO: 1500 - RNA, 19 nt, synthetic construct
  source 1..19: mol_type = other RNA
  modified_base 1: mod_base = OTHER; note = 2'-O-methyl-adenosine-3'-phosphorothioate
  modified_base 2: mod_base = OTHER; note = 2'-O-methyl-adenosine-3'-phosphorothioate
  modified_base 3: mod_base = OTHER; note = 2'-O-methyl-uridine-3'-phosphate
  modified_base 4: mod_base = OTHER; note = 2'-O-methyl-adenosine-3'-phosphate
  modified_base 5: mod_base = OTHER; note = 2'-deoxy-2'-fluoro-adenosine-3'-phosphate
  modified_base 6: mod_base = OTHER; note = 2'-O-methyl-cytidine-3'-phosphate
  modified_base 7: mod_base = OTHER; note = 2'-deoxy-2'-fluoro-adenosine-3'-phosphate
  modified_base 8: mod_base = OTHER; note = 2'-deoxy-2'-fluoro-cytidine-3'-phosphate
  modified_base 9: mod_base = OTHER; note = 2'-deoxy-2'-fluoro-adenosine-3'-phosphate
  modified_base 10: mod_base = OTHER; note = 2'-O-methyl-adenosine-3'-phosphate
  modified_base 11: mod_base = OTHER; note = 2'-O-methyl-adenosine-3'-phosphate
  modified_base 12: mod_base = OTHER; note = 2'-O-methyl-uridine-3'-phosphate
  modified_base 13: mod_base = OTHER; note = 2'-O-methyl-guanosine-3'-phosphate
  modified_base 14: mod_base = OTHER; note = 2'-O-methyl-adenosine-3'-phosphate
  modified_base 15: mod_base = OTHER; note = 2'-O-methyl-adenosine-3'-phosphate
  modified_base 16: mod_base = OTHER; note = 2'-O-methyl-guanosine-3'-phosphate
  modified_base 17: mod_base = OTHER; note = 2'-O-methyl-uridine-3'-phosphate
  modified_base 18: mod_base = OTHER; note = 2'-O-methyl-guanosine-3'-phosphate
  modified_base 19: mod_base = OTHER; note = 2'-O-methyl-adenosine-3'-phosphate
aataacacaaatgaagtga

SEQ ID NO: 1501 - RNA, 19 nt, synthetic construct
  source 1..19: mol_type = other RNA
  modified_base 1: mod_base = OTHER; note = 2'-O-methyl-cytidine-3'-phosphorothioate
  modified_base 2: mod_base = OTHER; note = 2'-O-methyl-cytidine-3'-phosphorothioate
  modified_base 3: mod_base = OTHER; note = 2'-O-methyl-adenosine-3'-phosphate
  modified_base 4: mod_base = OTHER; note = 2'-O-methyl-cytidine-3'-phosphate
  modified_base 5: mod_base = OTHER; note = 2'-deoxy-2'-fluoro-uridine-3'-phosphate
  modified_base 6: mod_base = OTHER; note = 2'-O-methyl-guanosine-3'-phosphate
  modified_base 7: mod_base = OTHER; note = 2'-deoxy-2'-fluoro-adenosine-3'-phosphate
  modified_base 8: mod_base = OTHER; note = 2'-deoxy-2'-fluoro-cytidine-3'-phosphate
  modified_base 9: mod_base = OTHER; note = 2'-deoxy-2'-fluoro-uridine-3'-phosphate
  modified_base 10: mod_base = OTHER; note = 2'-O-methyl-cytidine-3'-phosphate
  modified_base 11: mod_base = OTHER; note = 2'-O-methyl-cytidine-3'-phosphate
  modified_base 12: mod_base = OTHER; note = 2'-O-methyl-uridine-3'-phosphate
  modified_base 13: mod_base = OTHER; note = 2'-O-methyl-cytidine-3'-phosphate
  modified_base 14: mod_base = OTHER; note = 2'-O-methyl-adenosine-3'-phosphate
  modified_base 15: mod_base = OTHER; note = 2'-O-methyl-cytidine-3'-phosphate
  modified_base 16: mod_base = OTHER; note = 2'-O-methyl-adenosine-3'-phosphate
  modified_base 17: mod_base = OTHER; note = 2'-O-methyl-uridine-3'-phosphate
  modified_base 18: mod_base = OTHER; note = 2'-O-methyl-cytidine-3'-phosphate
  modified_base 19: mod_base = OTHER; note = 2'-O-methyl-adenosine-3'-phosphate
ccactgactcctcacatca

SEQ ID NO: 1502 - RNA, 19 nt, synthetic construct
  source 1..19: mol_type = other RNA
  modified_base 1: mod_base = OTHER; note = 2'-O-methyl-cytidine-3'-phosphorothioate
  modified_base 2: mod_base = OTHER; note = 2'-O-methyl-uridine-3'-phosphorothioate
  modified_base 3: mod_base = OTHER; note = 2'-O-methyl-cytidine-3'-phosphate
  modified_base 4: mod_base = OTHER; note = 2'-O-methyl-adenosine-3'-phosphate
  modified_base 5: mod_base = OTHER; note = 2'-deoxy-2'-fluoro-cytidine-3'-phosphate
  modified_base 6: mod_base = OTHER; note = 2'-O-methyl-adenosine-3'-phosphate
  modified_base 7: mod_base = OTHER; note = 2'-deoxy-2'-fluoro-uridine-3'-phosphate
  modified_base 8: mod_base = OTHER; note = 2'-deoxy-2'-fluoro-cytidine-3'-phosphate
  modified_base 9: mod_base = OTHER; note = 2'-deoxy-2'-fluoro-uridine-3'-phosphate
  modified_base 10: mod_base = OTHER; note = 2'-O-methyl-guanosine-3'-phosphate
  modified_base 11: mod_base = OTHER; note = 2'-O-methyl-uridine-3'-phosphate
  modified_base 12: mod_base = OTHER; note = 2'-O-methyl-uridine-3'-phosphate
  modified_base 13: mod_base = OTHER; note = 2'-O-methyl-adenosine-3'-phosphate
  modified_base 14: mod_base = OTHER; note = 2'-O-methyl-uridine-3'-phosphate
  modified_base 15: mod_base = OTHER; note = 2'-O-methyl-cytidine-3'-phosphate
  modified_base 16: mod_base = OTHER; note = 2'-O-methyl-uridine-3'-phosphate
  modified_base 17: mod_base = OTHER; note = 2'-O-methyl-uridine-3'-phosphate
  modified_base 18: mod_base = OTHER; note = 2'-O-methyl-adenosine-3'-phosphate
  modified_base 19: mod_base = OTHER; note = 2'-O-methyl-adenosine-3'-phosphate
ctcacatctgttatcttaa

SEQ ID NO: 1503 - RNA, 19 nt, synthetic construct
  source 1..19: mol_type = other RNA
  modified_base 1: mod_base = OTHER; note = 2'-O-methyl-uridine-3'-phosphorothioate
  modified_base 2: mod_base = OTHER; note = 2'-O-methyl-cytidine-3'-phosphorothioate
  modified_base 3: mod_base = OTHER; note = 2'-O-methyl-adenosine-3'-phosphate
  modified_base 4: mod_base = OTHER; note = 2'-O-methyl-cytidine-3'-phosphate
  modified_base 5: mod_base = OTHER; note = 2'-deoxy-2'-fluoro-adenosine-3'-phosphate
  modified_base 6: mod_base = OTHER; note = 2'-O-methyl-uridine-3'-phosphate
  modified_base 7: mod_base = OTHER; note = 2'-deoxy-2'-fluoro-cytidine-3'-phosphate
  modified_base 8: mod_base = OTHER; note = 2'-deoxy-2'-fluoro-uridine-3'-phosphate
  modified_base 9: mod_base = OTHER; note = 2'-deoxy-2'-fluoro-guanosine-3'-phosphate
  modified_base 10: mod_base = OTHER; note = 2'-O-methyl-uridine-3'-phosphate
  modified_base 11: mod_base = OTHER; note = 2'-O-methyl-uridine-3'-phosphate
  modified_base 12: mod_base = OTHER; note = 2'-O-methyl-adenosine-3'-phosphate
  modified_base 13: mod_base = OTHER; note = 2'-O-methyl-uridine-3'-phosphate
  modified_base 14: mod_base = OTHER; note = 2'-O-methyl-cytidine-3'-phosphate
  modified_base 15: mod_base = OTHER; note = 2'-O-methyl-uridine-3'-phosphate
  modified_base 16: mod_base = OTHER; note = 2'-O-methyl-uridine-3'-phosphate
  modified_base 17: mod_base = OTHER; note = 2'-O-methyl-adenosine-3'-phosphate
  modified_base 18: mod_base = OTHER; note = 2'-O-methyl-uridine-3'-phosphate
  modified_base 19: mod_base = OTHER; note = 2'-O-methyl-adenosine-3'-phosphate
tcacatctgttatcttata

SEQ ID NO: 1504 - RNA, 19 nt, synthetic construct
  source 1..19: mol_type = other RNA
  modified_base 1: mod_base = OTHER; note = 2'-O-methyl-cytidine-3'-phosphorothioate
  modified_base 2: mod_base = OTHER; note = 2'-O-methyl-adenosine-3'-phosphorothioate
  modified_base 3: mod_base = OTHER; note = 2'-O-methyl-cytidine-3'-phosphate
  modified_base 4: mod_base = OTHER; note = 2'-O-methyl-adenosine-3'-phosphate
  modified_base 5: mod_base = OTHER; note = 2'-deoxy-2'-fluoro-uridine-3'-phosphate
  modified_base 6: mod_base = OTHER; note = 2'-O-methyl-cytidine-3'-phosphate
  modified_base 7: mod_base = OTHER; note = 2'-deoxy-2'-fluoro-uridine-3'-phosphate
  modified_base 8: mod_base = OTHER; note = 2'-deoxy-2'-fluoro-guanosine-3'-phosphate
  modified_base 9: mod_base = OTHER; note = 2'-deoxy-2'-fluoro-uridine-3'-phosphate
  modified_base 10: mod_base = OTHER; note = 2'-O-methyl-uridine-3'-phosphate
  modified_base 11: mod_base = OTHER; note = 2'-O-methyl-adenosine-3'-phosphate
  modified_base 12: mod_base = OTHER; note = 2'-O-methyl-uridine-3'-phosphate
  modified_base 13: mod_base = OTHER; note = 2'-O-methyl-cytidine-3'-phosphate
  modified_base 14: mod_base = OTHER; note = 2'-O-methyl-uridine-3'-phosphate
  modified_base 15: mod_base = OTHER; note = 2'-O-methyl-uridine-3'-phosphate
  modified_base 16: mod_base = OTHER; note = 2'-O-methyl-adenosine-3'-phosphate
  modified_base 17: mod_base = OTHER; note = 2'-O-methyl-uridine-3'-phosphate
  modified_base 18: mod_base = OTHER; note = 2'-O-methyl-uridine-3'-phosphate
  modified_base 19: mod_base = OTHER; note = 2'-O-methyl-adenosine-3'-phosphate
cacatctgttatcttatta

SEQ ID NO: 1505 - RNA, 19 nt, synthetic construct
  source 1..19: mol_type = other RNA
  modified_base 1: mod_base = OTHER; note = 2'-O-methyl-adenosine-3'-phosphorothioate
  modified_base 2: mod_base = OTHER; note = 2'-O-methyl-guanosine-3'-phosphorothioate
  modified_base 3: mod_base = OTHER; note = 2'-O-methyl-adenosine-3'-phosphate
  modified_base 4: mod_base = OTHER; note = 2'-O-methyl-adenosine-3'-phosphate
  modified_base 5: mod_base = OTHER; note = 2'-deoxy-2'-fluoro-cytidine-3'-phosphate
  modified_base 6: mod_base = OTHER; note = 2'-O-methyl-uridine-3'-phosphate
  modified_base 7: mod_base = OTHER; note = 2'-deoxy-2'-fluoro-adenosine-3'-phosphate
  modified_base 8: mod_base = OTHER; note = 2'-deoxy-2'-fluoro-uridine-3'-phosphate
  modified_base 9: mod_base = OTHER; note = 2'-deoxy-2'-fluoro-uridine-3'-phosphate
  modified_base 10: mod_base = OTHER; note = 2'-O-methyl-uridine-3'-phosphate
  modified_base 11: mod_base = OTHER; note = 2'-O-methyl-guanosine-3'-phosphate
  modified_base 12: mod_base = OTHER; note = 2'-O-methyl-uridine-3'-phosphate
  modified_base 13: mod_base = OTHER; note = 2'-O-methyl-adenosine-3'-phosphate
  modified_base 14: mod_base = OTHER; note = 2'-O-methyl-guanosine-3'-phosphate
  modified_base 15: mod_base = OTHER; note = 2'-O-methyl-uridine-3'-phosphate
  modified_base 16: mod_base = OTHER; note = 2'-O-methyl-adenosine-3'-phosphate
  modified_base 17: mod_base = OTHER; note = 2'-O-methyl-adenosine-3'-phosphate
  modified_base 18: mod_base = OTHER; note = 2'-O-methyl-cytidine-3'-phosphate
  modified_base 19: mod_base = OTHER; note = 2'-O-methyl-adenosine-3'-phosphate
agaactatttgtagtaaca

SEQ ID NO: 1506 - RNA, 19 nt, synthetic construct
  source 1..19: mol_type = other RNA
  modified_base 1: mod_base = OTHER; note = 2'-O-methyl-guanosine-3'-phosphorothioate
  modified_base 2: mod_base = OTHER; note = 2'-O-methyl-adenosine-3'-phosphorothioate
  modified_base 3: mod_base = OTHER; note = 2'-O-methyl-adenosine-3'-phosphate
  modified_base 4: mod_base = OTHER; note = 2'-O-methyl-cytidine-3'-phosphate
  modified_base 5: mod_base = OTHER; note = 2'-deoxy-2'-fluoro-uridine-3'-phosphate
  modified_base 6: mod_base = OTHER; note = 2'-O-methyl-adenosine-3'-phosphate
  modified_base 7: mod_base = OTHER; note = 2'-deoxy-2'-fluoro-uridine-3'-phosphate
  modified_base 8: mod_base = OTHER; note = 2'-deoxy-2'-fluoro-uridine-3'-phosphate
  modified_base 9: mod_base = OTHER; note = 2'-deoxy-2'-fluoro-uridine-3'-phosphate
  modified_base 10: mod_base = OTHER; note = 2'-O-methyl-guanosine-3'-phosphate
  modified_base 11: mod_base = OTHER; note = 2'-O-methyl-uridine-3'-phosphate
  modified_base 12: mod_base = OTHER; note = 2'-O-methyl-adenosine-3'-phosphate
  modified_base 13: mod_base = OTHER; note = 2'-O-methyl-guanosine-3'-phosphate
  modified_base 14: mod_base = OTHER; note = 2'-O-methyl-uridine-3'-phosphate
  modified_base 15: mod_base = OTHER; note = 2'-O-methyl-adenosine-3'-phosphate
  modified_base 16: mod_base = OTHER; note = 2'-O-methyl-adenosine-3'-phosphate
  modified_base 17: mod_base = OTHER; note = 2'-O-methyl-cytidine-3'-phosphate
  modified_base 18: mod_base = OTHER; note = 2'-O-methyl-uridine-3'-phosphate
  modified_base 19: mod_base = OTHER; note = 2'-O-methyl-adenosine-3'-phosphate
gaactatttgtagtaacta

SEQ ID NO: 1507 - RNA, 19 nt, synthetic construct
  source 1..19: mol_type = other RNA
  modified_base 1: mod_base = OTHER; note = 2'-O-methyl-cytidine-3'-phosphorothioate
  modified_base 2: mod_base = OTHER; note = 2'-O-methyl-uridine-3'-phosphorothioate
  modified_base 3: mod_base = OTHER; note = 2'-O-methyl-adenosine-3'-phosphate
  modified_base 4: mod_base = OTHER; note = 2'-O-methyl-uridine-3'-phosphate
  modified_base 5: mod_base = OTHER; note = 2'-deoxy-2'-fluoro-uridine-3'-phosphate
  modified_base 6: mod_base = OTHER; note = 2'-O-methyl-uridine-3'-phosphate
  modified_base 7: mod_base = OTHER; note = 2'-deoxy-2'-fluoro-guanosine-3'-phosphate
  modified_base 8: mod_base = OTHER; note = 2'-deoxy-2'-fluoro-uridine-3'-phosphate
  modified_base 9: mod_base = OTHER; note = 2'-deoxy-2'-fluoro-adenosine-3'-phosphate
  modified_base 10: mod_base = OTHER; note = 2'-O-methyl-guanosine-3'-phosphate
  modified_base 11: mod_base = OTHER; note = 2'-O-methyl-uridine-3'-phosphate
  modified_base 12: mod_base = OTHER; note = 2'-O-methyl-adenosine-3'-phosphate
  modified_base 13: mod_base = OTHER; note = 2'-O-methyl-adenosine-3'-phosphate
  modified_base 14: mod_base = OTHER; note = 2'-O-methyl-cytidine-3'-phosphate
  modified_base 15: mod_base = OTHER; note = 2'-O-methyl-uridine-3'-phosphate
  modified_base 16: mod_base = OTHER; note = 2'-O-methyl-adenosine-3'-phosphate
  modified_base 17: mod_base = OTHER; note = 2'-O-methyl-uridine-3'-phosphate
  modified_base 18: mod_base = OTHER; note = 2'-O-methyl-cytidine-3'-phosphate
  modified_base 19: mod_base = OTHER; note = 2'-O-methyl-adenosine-3'-phosphate
ctatttgtagtaactatca

SEQ ID NO: 1508 - RNA, 19 nt, synthetic construct
  source 1..19: mol_type = other RNA
  modified_base 1: mod_base = OTHER; note = 2'-O-methyl-uridine-3'-phosphorothioate
  modified_base 2: mod_base = OTHER; note = 2'-O-methyl-adenosine-3'-phosphorothioate
  modified_base 3: mod_base = OTHER; note = 2'-O-methyl-uridine-3'-phosphate
  modified_base 4: mod_base = OTHER; note = 2'-O-methyl-uridine-3'-phosphate
  modified_base 5: mod_base = OTHER; note = 2'-deoxy-2'-fluoro-uridine-3'-phosphate
  modified_base 6: mod_base = OTHER; note = 2'-O-methyl-guanosine-3'-phosphate
  modified_base 7: mod_base = OTHER; note = 2'-deoxy-2'-fluoro-uridine-3'-phosphate
  modified_base 8: mod_base = OTHER; note = 2'-deoxy-2'-fluoro-adenosine-3'-phosphate
  modified_base 9: mod_base = OTHER; note = 2'-deoxy-2'-fluoro-guanosine-3'-phosphate
  modified_base 10: mod_base = OTHER; note = 2'-O-methyl-uridine-3'-phosphate
  modified_base 11: mod_base = OTHER; note = 2'-O-methyl-adenosine-3'-phosphate
  modified_base 12: mod_base = OTHER; note = 2'-O-methyl-adenosine-3'-phosphate
  modified_base 13: mod_base = OTHER; note = 2'-O-methyl-cytidine-3'-phosphate
  modified_base 14: mod_base = OTHER; note = 2'-O-methyl-uridine-3'-phosphate
  modified_base 15: mod_base = OTHER; note = 2'-O-methyl-adenosine-3'-phosphate
  modified_base 16: mod_base = OTHER; note = 2'-O-methyl-uridine-3'-phosphate
  modified_base 17: mod_base = OTHER; note = 2'-O-methyl-cytidine-3'-phosphate
  modified_base 18: mod_base = OTHER; note = 2'-O-methyl-adenosine-3'-phosphate
  modified_base 19: mod_base = OTHER; note = 2'-O-methyl-adenosine-3'-phosphate
tatttgtagtaactatcaa

SEQ ID NO: 1509 - RNA, 19 nt, synthetic construct
  source 1..19: mol_type = other RNA
  modified_base 1: mod_base = OTHER; note = 2'-O-methyl-adenosine-3'-phosphorothioate
  modified_base 2: mod_base = OTHER; note = 2'-O-methyl-uridine-3'-phosphorothioate
  modified_base 3: mod_base = OTHER; note = 2'-O-methyl-uridine-3'-phosphate
  modified_base 4: mod_base = OTHER; note = 2'-O-methyl-uridine-3'-phosphate
  modified_base 5: mod_base = OTHER; note = 2'-deoxy-2'-fluoro-guanosine-3'-phosphate
  modified_base 6: mod_base = OTHER; note = 2'-O-methyl-uridine-3'-phosphate
  modified_base 7: mod_base = OTHER; note = 2'-deoxy-2'-fluoro-adenosine-3'-phosphate
  modified_base 8: mod_base = OTHER; note = 2'-deoxy-2'-fluoro-guanosine-3'-phosphate
  modified_base 9: mod_base = OTHER; note = 2'-deoxy-2'-fluoro-uridine-3'-phosphate
  modified_base 10: mod_base = OTHER; note = 2'-O-methyl-adenosine-3'-phosphate
  modified_base 11: mod_base = OTHER; note = 2'-O-methyl-adenosine-3'-phosphate
  modified_base 12: mod_base = OTHER; note = 2'-O-methyl-cytidine-3'-phosphate
  modified_base 13: mod_base = OTHER; note = 2'-O-methyl-uridine-3'-phosphate
  modified_base 14: mod_base = OTHER; note = 2'-O-methyl-adenosine-3'-phosphate
  modified_base 15: mod_base = OTHER; note = 2'-O-methyl-uridine-3'-phosphate
  modified_base 16: mod_base = OTHER; note = 2'-O-methyl-cytidine-3'-phosphate
  modified_base 17: mod_base = OTHER; note = 2'-O-methyl-adenosine-3'-phosphate
  modified_base 18: mod_base = OTHER; note = 2'-O-methyl-guanosine-3'-phosphate
  modified_base 19: mod_base = OTHER; note = 2'-O-methyl-adenosine-3'-phosphate
atttgtagtaactatcaga

SEQ ID NO: 1510 - RNA, 19 nt, synthetic construct
  source 1..19: mol_type = other RNA
  modified_base 1: mod_base = OTHER; note = 2'-O-methyl-guanosine-3'-phosphorothioate
  modified_base 2: mod_base = OTHER; note = 2'-O-methyl-uridine-3'-phosphorothioate
  modified_base 3: mod_base = OTHER; note = 2'-O-methyl-adenosine-3'-phosphate
  modified_base 4: mod_base = OTHER; note = 2'-O-methyl-guanosine-3'-phosphate
  modified_base 5: mod_base = OTHER; note = 2'-deoxy-2'-fluoro-uridine-3'-phosphate
  modified_base 6: mod_base = OTHER; note = 2'-O-methyl-adenosine-3'-phosphate
  modified_base 7: mod_base = OTHER; note = 2'-deoxy-2'-fluoro-adenosine-3'-phosphate
  modified_base 8: mod_base = OTHER; note = 2'-deoxy-2'-fluoro-cytidine-3'-phosphate
  modified_base 9: mod_base = OTHER; note = 2'-deoxy-2'-fluoro-uridine-3'-phosphate
  modified_base 10: mod_base = OTHER; note = 2'-O-methyl-adenosine-3'-phosphate
  modified_base 11: mod_base = OTHER; note = 2'-O-methyl-uridine-3'-phosphate
  modified_base 12: mod_base = OTHER; note = 2'-O-methyl-cytidine-3'-phosphate
  modified_base 13: mod_base = OTHER; note = 2'-O-methyl-adenosine-3'-phosphate
  modified_base 14: mod_base = OTHER; note = 2'-O-methyl-guanosine-3'-phosphate
  modified_base 15: mod_base = OTHER; note = 2'-O-methyl-adenosine-3'-phosphate
  modified_base 16: mod_base = OTHER; note = 2'-O-methyl-adenosine-3'-phosphate
  modified_base 17: mod_base = OTHER; note = 2'-O-methyl-uridine-3'-phosphate
  modified_base 18: mod_base = OTHER; note = 2'-O-methyl-cytidine-3'-phosphate
  modified_base 19: mod_base = OTHER; note = 2'-O-methyl-adenosine-3'-phosphate
gtagtaactatcagaatca

SEQ ID NO: 1511 - RNA, 19 nt, synthetic construct
  source 1..19: mol_type = other RNA
  modified_base 1: mod_base = OTHER; note = 2'-O-methyl-uridine-3'-phosphorothioate
  modified_base 2: mod_base = OTHER; note = 2'-O-methyl-adenosine-3'-phosphorothioate
  modified_base 3: mod_base = OTHER; note = 2'-O-methyl-guanosine-3'-phosphate
  modified_base 4: mod_base = OTHER; note = 2'-O-methyl-uridine-3'-phosphate
  modified_base 5: mod_base = OTHER; note = 2'-deoxy-2'-fluoro-adenosine-3'-phosphate
  modified_base 6: mod_base = OTHER; note = 2'-O-methyl-adenosine-3'-phosphate
  modified_base 7: mod_base = OTHER; note = 2'-deoxy-2'-fluoro-cytidine-3'-phosphate
  modified_base 8: mod_base = OTHER; note = 2'-deoxy-2'-fluoro-uridine-3'-phosphate
  modified_base 9: mod_base = OTHER; note = 2'-deoxy-2'-fluoro-adenosine-3'-phosphate
  modified_base 10: mod_base = OTHER; note = 2'-O-methyl-uridine-3'-phosphate
  modified_base 11: mod_base = OTHER; note = 2'-O-methyl-cytidine-3'-phosphate
  modified_base 12: mod_base = OTHER; note = 2'-O-methyl-adenosine-3'-phosphate
  modified_base 13: mod_base = OTHER; note = 2'-O-methyl-guanosine-3'-phosphate
  modified_base 14: mod_base = OTHER; note = 2'-O-methyl-adenosine-3'-phosphate
  modified_base 15: mod_base = OTHER; note = 2'-O-methyl-adenosine-3'-phosphate
  modified_base 16: mod_base = OTHER; note = 2'-O-methyl-uridine-3'-phosphate
  modified_base 17: mod_base = OTHER; note = 2'-O-methyl-cytidine-3'-phosphate
  modified_base 18: mod_base = OTHER; note = 2'-O-methyl-uridine-3'-phosphate
  modified_base 19: mod_base = OTHER; note = 2'-O-methyl-adenosine-3'-phosphate
tagtaactatcagaatcta

SEQ ID NO: 1512 - RNA, 19 nt, synthetic construct
  source 1..19: mol_type = other RNA
  modified_base 1: mod_base = OTHER; note = 2'-O-methyl-uridine-3'-phosphorothioate
  modified_base 2: mod_base = OTHER; note = 2'-O-methyl-adenosine-3'-phosphorothioate
  modified_base 3: mod_base = OTHER; note = 2'-O-methyl-adenosine-3'-phosphate
  modified_base 4: mod_base = OTHER; note = 2'-O-methyl-cytidine-3'-phosphate
  modified_base 5: mod_base = OTHER; note = 2'-deoxy-2'-fluoro-uridine-3'-phosphate
  modified_base 6: mod_base = OTHER; note = 2'-O-methyl-adenosine-3'-phosphate
  modified_base 7: mod_base = OTHER; note = 2'-deoxy-2'-fluoro-uridine-3'-phosphate
  modified_base 8: mod_base = OTHER; note = 2'-deoxy-2'-fluoro-cytidine-3'-phosphate
  modified_base 9: mod_base = OTHER; note = 2'-deoxy-2'-fluoro-adenosine-3'-phosphate
  modified_base 10: mod_base = OTHER; note = 2'-O-methyl-guanosine-3'-phosphate
  modified_base 11: mod_base = OTHER; note = 2'-O-methyl-adenosine-3'-phosphate
  modified_base 12: mod_base = OTHER; note = 2'-O-methyl-adenosine-3'-phosphate
  modified_base 13: mod_base = OTHER; note = 2'-O-methyl-uridine-3'-phosphate
  modified_base 14: mod_base = OTHER; note = 2'-O-methyl-cytidine-3'-phosphate
  modified_base 15: mod_base = OTHER; note = 2'-O-methyl-uridine-3'-phosphate
  modified_base 16: mod_base = OTHER; note = 2'-O-methyl-adenosine-3'-phosphate
  modified_base 17: mod_base = OTHER; note = 2'-O-methyl-cytidine-3'-phosphate
  modified_base 18: mod_base = OTHER; note = 2'-O-methyl-adenosine-3'-phosphate
  modified_base 19: mod_base = OTHER; note = 2'-O-methyl-adenosine-3'-phosphate
taactatcagaatctacaa

SEQ ID NO: 1513 - RNA, 19 nt, synthetic construct
  source 1..19: mol_type = other RNA
  modified_base 1: mod_base = OTHER; note = 2'-O-methyl-cytidine-3'-phosphorothioate
  modified_base 2: mod_base = OTHER; note = 2'-O-methyl-uridine-3'-phosphorothioate
  modified_base 3: mod_base = OTHER; note = 2'-O-methyl-adenosine-3'-phosphate
  modified_base 4: mod_base = OTHER; note = 2'-O-methyl-uridine-3'-phosphate
  modified_base 5: mod_base = OTHER; note = 2'-deoxy-2'-fluoro-cytidine-3'-phosphate
  modified_base 6: mod_base = OTHER; note = 2'-O-methyl-adenosine-3'-phosphate
  modified_base 7: mod_base = OTHER; note = 2'-deoxy-2'-fluoro-guanosine-3'-phosphate
  modified_base 8: mod_base = OTHER; note = 2'-deoxy-2'-fluoro-adenosine-3'-phosphate
  modified_base 9: mod_base = OTHER; note = 2'-deoxy-2'-fluoro-adenosine-3'-phosphate
  modified_base 10: mod_base = OTHER; note = 2'-O-methyl-uridine-3'-phosphate
  modified_base 11: mod_base = OTHER; note = 2'-O-methyl-cytidine-3'-phosphate
  modified_base 12: mod_base = OTHER; note = 2'-O-methyl-uridine-3'-phosphate
  modified_base 13: mod_base = OTHER; note = 2'-O-methyl-adenosine-3'-phosphate
  modified_base 14: mod_base = OTHER; note = 2'-O-methyl-cytidine-3'-phosphate
  modified_base 15: mod_base = OTHER; note = 2'-O-methyl-adenosine-3'-phosphate
  modified_base 16: mod_base = OTHER; note = 2'-O-methyl-uridine-3'-phosphate
  modified_base 17: mod_base = OTHER; note = 2'-O-methyl-uridine-3'-phosphate
  modified_base 18: mod_base = OTHER; note = 2'-O-methyl-cytidine-3'-phosphate
  modified_base 19: mod_base = OTHER; note = 2'-O-methyl-adenosine-3'-phosphate
ctatcagaatctacattca

SEQ ID NO: 1514 - RNA, 19 nt, synthetic construct
  source 1..19: mol_type = other RNA
  modified_base 1: mod_base = OTHER; note = 2'-O-methyl-uridine-3'-phosphorothioate
  modified_base 2: mod_base = OTHER; note = 2'-O-methyl-adenosine-3'-phosphorothioate
  modified_base 3: mod_base = OTHER; note = 2'-O-methyl-adenosine-3'-phosphate
  modified_base 4: mod_base = OTHER; note = 2'-O-methyl-adenosine-3'-phosphate
  modified_base 5: mod_base = OTHER; note = 2'-deoxy-2'-fluoro-guanosine-3'-phosphate
  modified_base 6: mod_base = OTHER; note = 2'-O-methyl-uridine-3'-phosphate
  modified_base 7: mod_base = OTHER; note = 2'-deoxy-2'-fluoro-uridine-3'-phosphate
  modified_base 8: mod_base = OTHER; note = 2'-deoxy-2'-fluoro-guanosine-3'-phosphate
  modified_base 9: mod_base = OTHER; note = 2'-deoxy-2'-fluoro-adenosine-3'-phosphate
  modified_base 10: mod_base = OTHER; note = 2'-O-methyl-uridine-3'-phosphate
  modified_base 11: mod_base = OTHER; note = 2'-O-methyl-guanosine-3'-phosphate
  modified_base 12: mod_base = OTHER; note = 2'-O-methyl-adenosine-3'-phosphate
  modified_base 13: mod_base = OTHER; note = 2'-O-methyl-guanosine-3'-phosphate
  modified_base 14: mod_base = OTHER; note = 2'-O-methyl-adenosine-3'-phosphate
  modified_base 15: mod_base = OTHER; note = 2'-O-methyl-adenosine-3'-phosphate
  modified_base 16: mod_base = OTHER; note = 2'-O-methyl-uridine-3'-phosphate
  modified_base 17: mod_base = OTHER; note = 2'-O-methyl-cytidine-3'-phosphate
  modified_base 18: mod_base = OTHER; note = 2'-O-methyl-adenosine-3'-phosphate
  modified_base 19: mod_base = OTHER; note = 2'-O-methyl-adenosine-3'-phosphate
taaagttgatgagaatcaa

SEQ ID NO: 1515 - RNA, 19 nt, synthetic construct
  source 1..19: mol_type = other RNA
  modified_base 1: mod_base = OTHER; note = 2'-O-methyl-adenosine-3'-phosphorothioate
  modified_base 2: mod_base = OTHER; note = 2'-O-methyl-adenosine-3'-phosphorothioate
  modified_base 3: mod_base = OTHER; note = 2'-O-methyl-adenosine-3'-phosphate
  modified_base 4: mod_base = OTHER; note = 2'-O-methyl-guanosine-3'-phosphate
  modified_base 5: mod_base = OTHER; note = 2'-deoxy-2'-fluoro-uridine-3'-phosphate
  modified_base 6: mod_base = OTHER; note = 2'-O-methyl-uridine-3'-phosphate
  modified_base 7: mod_base = OTHER; note = 2'-deoxy-2'-fluoro-guanosine-3'-phosphate
  modified_base 8: mod_base = OTHER; note = 2'-deoxy-2'-fluoro-adenosine-3'-phosphate
  modified_base 9: mod_base = OTHER; note = 2'-deoxy-2'-fluoro-uridine-3'-phosphate
  modified_base 10: mod_base = OTHER; note = 2'-O-methyl-guanosine-3'-phosphate
  modified_base 11: mod_base = OTHER; note = 2'-O-methyl-adenosine-3'-phosphate
  modified_base 12: mod_base = OTHER; note = 2'-O-methyl-guanosine-3'-phosphate
  modified_base 13: mod_base = OTHER; note = 2'-O-methyl-adenosine-3'-phosphate
  modified_base 14: mod_base = OTHER; note = 2'-O-methyl-adenosine-3'-phosphate
  modified_base 15: mod_base = OTHER; note = 2'-O-methyl-uridine-3'-phosphate
  modified_base 16: mod_base = OTHER; note = 2'-O-methyl-cytidine-3'-phosphate
  modified_base 17: mod_base = OTHER; note = 2'-O-methyl-adenosine-3'-phosphate
  modified_base 18: mod_base = OTHER; note = 2'-O-methyl-adenosine-3'-phosphate
  modified_base 19: mod_base = OTHER; note = 2'-O-methyl-adenosine-3'-phosphate
aaagttgatgagaatcaaa

SEQ ID NO: 1516 - RNA, 19 nt, synthetic construct
  source 1..19: mol_type = other RNA
  modified_base 1: mod_base = OTHER; note = 2'-O-methyl-adenosine-3'-phosphorothioate
  modified_base 2: mod_base = OTHER; note = 2'-O-methyl-adenosine-3'-phosphorothioate
  modified_base 3: mod_base = OTHER; note = 2'-O-methyl-guanosine-3'-phosphate
  modified_base 4: mod_base = OTHER; note = 2'-O-methyl-uridine-3'-phosphate
  modified_base 5: mod_base = OTHER; note = 2'-deoxy-2'-fluoro-uridine-3'-phosphate
  modified_base 6: mod_base = OTHER; note = 2'-O-methyl-guanosine-3'-phosphate
  modified_base 7: mod_base = OTHER; note = 2'-deoxy-2'-fluoro-adenosine-3'-phosphate
  modified_base 8: mod_base = OTHER; note = 2'-deoxy-2'-fluoro-uridine-3'-phosphate
  modified_base 9: mod_base = OTHER; note = 2'-deoxy-2'-fluoro-guanosine-3'-phosphate
  modified_base 10: mod_base = OTHER; note = 2'-O-methyl-adenosine-3'-phosphate
  modified_base 11: mod_base = OTHER; note = 2'-O-methyl-guanosine-3'-phosphate
  modified_base 12: mod_base = OTHER; note = 2'-O-methyl-adenosine-3'-phosphate
  modified_base 13: mod_base = OTHER; note = 2'-O-methyl-adenosine-3'-phosphate
  modified_base 14: mod_base = OTHER; note = 2'-O-methyl-uridine-3'-phosphate
  modified_base 15: mod_base = OTHER; note = 2'-O-methyl-cytidine-3'-phosphate
  modified_base 16: mod_base = OTHER; note = 2'-O-methyl-adenosine-3'-phosphate
  modified_base 17: mod_base = OTHER; note = 2'-O-methyl-adenosine-3'-phosphate
  modified_base 18: mod_base = OTHER; note = 2'-O-methyl-guanosine-3'-phosphate
  modified_base 19: mod_base = OTHER; note = 2'-O-methyl-adenosine-3'-phosphate
aagttgatgagaatcaaga

SEQ ID NO: 1517 - RNA, 19 nt, synthetic construct
  source 1..19: mol_type = other RNA
  modified_base 1: mod_base = OTHER; note = 2'-O-methyl-adenosine-3'-phosphorothioate
  modified_base 2: mod_base = OTHER; note = 2'-O-methyl-guanosine-3'-phosphorothioate
  modified_base 3: mod_base = OTHER; note = 2'-O-methyl-uridine-3'-phosphate
  modified_base 4: mod_base = OTHER; note = 2'-O-methyl-uridine-3'-phosphate
  modified_base 5: mod_base = OTHER; note = 2'-deoxy-2'-fluoro-guanosine-3'-phosphate
  modified_base 6: mod_base = OTHER; note = 2'-O-methyl-adenosine-3'-phosphate
  modified_base 7: mod_base = OTHER; note = 2'-deoxy-2'-fluoro-uridine-3'-phosphate
  modified_base 8: mod_base = OTHER; note = 2'-deoxy-2'-fluoro-guanosine-3'-phosphate
  modified_base 9: mod_base = OTHER; note = 2'-deoxy-2'-fluoro-adenosine-3'-phosphate
  modified_base 10: mod_base = OTHER; note = 2'-O-methyl-guanosine-3'-phosphate
  modified_base 11: mod_base = OTHER; note = 2'-O-methyl-adenosine-3'-phosphate
  modified_base 12: mod_base = OTHER; note = 2'-O-methyl-adenosine-3'-phosphate
  modified_base 13: mod_base = OTHER; note = 2'-O-methyl-uridine-3'-phosphate
  modified_base 14: mod_base = OTHER; note = 2'-O-methyl-cytidine-3'-phosphate
  modified_base 15: mod_base = OTHER; note = 2'-O-methyl-adenosine-3'-phosphate
  modified_base 16: mod_base = OTHER; note = 2'-O-methyl-adenosine-3'-phosphate
  modified_base 17: mod_base = OTHER; note = 2'-O-methyl-guanosine-3'-phosphate
  modified_base 18: mod_base = OTHER; note = 2'-O-methyl-uridine-3'-phosphate
  modified_base 19: mod_base = OTHER; note = 2'-O-methyl-adenosine-3'-phosphate
agttgatgagaatcaagta

SEQ ID NO: 1518 - RNA, 19 nt, synthetic construct
  source 1..19: mol_type = other RNA
  modified_base 1: mod_base = OTHER; note = 2'-O-methyl-adenosine-3'-phosphorothioate
  modified_base 2: mod_base = OTHER; note = 2'-O-methyl-guanosine-3'-phosphorothioate
  modified_base 3: mod_base = OTHER; note = 2'-O-methyl-uridine-3'-phosphate
  modified_base 4: mod_base = OTHER; note = 2'-O-methyl-adenosine-3'-phosphate
  modified_base 5: mod_base = OTHER; note = 2'-deoxy-2'-fluoro-adenosine-3'-phosphate
  modified_base 6: mod_base = OTHER; note = 2'-O-methyl-guanosine-3'-phosphate
  modified_base 7: mod_base = OTHER; note = 2'-deoxy-2'-fluoro-guanosine-3'-phosphate
  modified_base 8: mod_base = OTHER; note = 2'-deoxy-2'-fluoro-cytidine-3'-phosphate
  modified_base 9: mod_base = OTHER; note = 2'-deoxy-2'-fluoro-cytidine-3'-phosphate
  modified_base 10: mod_base = OTHER; note = 2'-O-methyl-adenosine-3'-phosphate
  modified_base 11: mod_base = OTHER; note = 2'-O-methyl-uridine-3'-phosphate
  modified_base 12: mod_base = OTHER; note = 2'-O-methyl-adenosine-3'-phosphate
  modified_base 13: mod_base = OTHER; note = 2'-O-methyl-cytidine-3'-phosphate
  modified_base 14: mod_base = OTHER; note = 2'-O-methyl-uridine-3'-phosphate
  modified_base 15: mod_base = OTHER; note = 2'-O-methyl-cytidine-3'-phosphate
  modified_base 16: mod_base = OTHER; note = 2'-O-methyl-uridine-3'-phosphate
  modified_base 17: mod_base = OTHER; note = 2'-O-methyl-uridine-3'-phosphate
  modified_base 18: mod_base = OTHER; note = 2'-O-methyl-adenosine-3'-phosphate
  modified_base 19: mod_base = OTHER; note = 2'-O-methyl-adenosine-3'-phosphate
agtaaggccatactcttaa

SEQ ID NO: 1519 - RNA, 19 nt, synthetic construct
  source 1..19: mol_type = other RNA
  modified_base 1: mod_base = OTHER; note = 2'-O-methyl-guanosine-3'-phosphorothioate
  modified_base 2: mod_base = OTHER; note = 2'-O-methyl-uridine-3'-phosphorothioate
  modified_base 3: mod_base = OTHER; note = 2'-O-methyl-adenosine-3'-phosphate
  modified_base 4: mod_base = OTHER; note = 2'-O-methyl-adenosine-3'-phosphate
  modified_base 5: mod_base = OTHER; note = 2'-deoxy-2'-fluoro-guanosine-3'-phosphate
  modified_base 6: mod_base = OTHER; note = 2'-O-methyl-guanosine-3'-phosphate
  modified_base 7: mod_base = OTHER; note = 2'-deoxy-2'-fluoro-cytidine-3'-phosphate
  modified_base 8: mod_base = OTHER; note = 2'-deoxy-2'-fluoro-cytidine-3'-phosphate
  modified_base 9: mod_base = OTHER; note = 2'-deoxy-2'-fluoro-adenosine-3'-phosphate
  modified_base 10: mod_base = OTHER; note = 2'-O-methyl-uridine-3'-phosphate
  modified_base 11: mod_base = OTHER; note = 2'-O-methyl-adenosine-3'-phosphate
  modified_base 12: mod_base = OTHER; note = 2'-O-methyl-cytidine-3'-phosphate
  modified_base 13: mod_base = OTHER; note = 2'-O-methyl-uridine-3'-phosphate
  modified_base 14: mod_base = OTHER; note = 2'-O-methyl-cytidine-3'-phosphate
  modified_base 15: mod_base = OTHER; note = 2'-O-methyl-uridine-3'-phosphate
  modified_base 16: mod_base = OTHER; note = 2'-O-methyl-uridine-3'-phosphate
  modified_base 17: mod_base = OTHER; note = 2'-O-methyl-adenosine-3'-phosphate
  modified_base 18: mod_base = OTHER; note = 2'-O-methyl-cytidine-3'-phosphate
  modified_base 19: mod_base = OTHER; note = 2'-O-methyl-adenosine-3'-phosphate
gtaaggccatactcttaca

SEQ ID NO: 1520 - RNA, 19 nt, synthetic construct
  source 1..19: mol_type = other RNA
  modified_base 1: mod_base = OTHER; note = 2'-O-methyl-uridine-3'-phosphorothioate
  modified_base 2: mod_base = OTHER; note = 2'-O-methyl-adenosine-3'-phosphorothioate
  modified_base 3: mod_base = OTHER; note = 2'-O-methyl-adenosine-3'-phosphate
  modified_base 4: mod_base = OTHER; note = 2'-O-methyl-guanosine-3'-phosphate
  modified_base 5: mod_base = OTHER; note = 2'-deoxy-2'-fluoro-guanosine-3'-phosphate
  modified_base 6: mod_base = OTHER; note = 2'-O-methyl-cytidine-3'-phosphate
  modified_base 7: mod_base = OTHER; note = 2'-deoxy-2'-fluoro-cytidine-3'-phosphate
  modified_base 8: mod_base = OTHER; note = 2'-deoxy-2'-fluoro-adenosine-3'-phosphate
  modified_base 9: mod_base = OTHER; note = 2'-deoxy-2'-fluoro-uridine-3'-phosphate
  modified_base 10: mod_base = OTHER; note = 2'-O-methyl-adenosine-3'-phosphate
  modified_base 11: mod_base = OTHER; note = 2'-O-methyl-cytidine-3'-phosphate
  modified_base 12: mod_base = OTHER; note = 2'-O-methyl-uridine-3'-phosphate
  modified_base 13: mod_base = OTHER; note = 2'-O-methyl-cytidine-3'-phosphate
  modified_base 14: mod_base = OTHER; note = 2'-O-methyl-uridine-3'-phosphate
  modified_base 15: mod_base = OTHER; note = 2'-O-methyl-uridine-3'-phosphate
  modified_base 16: mod_base = OTHER; note = 2'-O-methyl-adenosine-3'-phosphate
  modified_base 17: mod_base = OTHER; note = 2'-O-methyl-cytidine-3'-phosphate
  modified_base 18: mod_base = OTHER; note = 2'-O-methyl-adenosine-3'-phosphate
  modified_base 19: mod_base = OTHER; note = 2'-O-methyl-adenosine-3'-phosphate
taaggccatactcttacaa

SEQ ID NO: 1521 - RNA, 19 nt, synthetic construct
  source 1..19: mol_type = other RNA
  modified_base 1: mod_base = OTHER; note = 2'-O-methyl-guanosine-3'-phosphorothioate
  modified_base 2: mod_base = OTHER; note = 2'-O-methyl-guanosine-3'-phosphorothioate
  modified_base 3: mod_base = OTHER; note = 2'-O-methyl-cytidine-3'-phosphate
  modified_base 4: mod_base = OTHER; note = 2'-O-methyl-cytidine-3'-phosphate
  modified_base 5: mod_base = OTHER; note = 2'-deoxy-2'-fluoro-adenosine-3'-phosphate
  modified_base 6: mod_base = OTHER; note = 2'-O-methyl-uridine-3'-phosphate
  modified_base 7: mod_base = OTHER; note = 2'-deoxy-2'-fluoro-adenosine-3'-phosphate
  modified_base 8: mod_base = OTHER; note = 2'-deoxy-2'-fluoro-cytidine-3'-phosphate
  modified_base 9: mod_base = OTHER; note = 2'-deoxy-2'-fluoro-uridine-3'-phosphate
  modified_base 10: mod_base = OTHER; note = 2'-O-methyl-cytidine-3'-phosphate
  modified_base 11: mod_base = OTHER; note = 2'-O-methyl-uridine-3'-phosphate
  modified_base 12: mod_base = OTHER; note = 2'-O-methyl-uridine-3'-phosphate
  modified_base 13: mod_base = OTHER; note = 2'-O-methyl-adenosine-3'-phosphate
  modified_base 14: mod_base = OTHER; note = 2'-O-methyl-cytidine-3'-phosphate
  modified_base 15: mod_base = OTHER; note = 2'-O-methyl-adenosine-3'-phosphate
  modified_base 16: mod_base = OTHER; note = 2'-O-methyl-uridine-3'-phosphate
  modified_base 17: mod_base = OTHER; note = 2'-O-methyl-adenosine-3'-phosphate
  modified_base 18: mod_base = OTHER; note = 2'-O-methyl-adenosine-3'-phosphate
  modified_base 19: mod_base = OTHER; note = 2'-O-methyl-adenosine-3'-phosphate
ggccatactcttacataaa

SEQ ID NO: 1522 - RNA, 19 nt, synthetic construct
  source 1..19: mol_type = other RNA
  modified_base 1: mod_base = OTHER; note = 2'-O-methyl-guanosine-3'-phosphorothioate
  modified_base 2: mod_base = OTHER; note = 2'-O-methyl-cytidine-3'-phosphorothioate
  modified_base 3: mod_base = OTHER; note = 2'-O-methyl-cytidine-3'-phosphate
  modified_base 4: mod_base = OTHER; note = 2'-O-methyl-adenosine-3'-phosphate
  modified_base 5: mod_base = OTHER; note = 2'-deoxy-2'-fluoro-uridine-3'-phosphate
  modified_base 6: mod_base = OTHER; note = 2'-O-methyl-adenosine-3'-phosphate
  modified_base 7: mod_base = OTHER; note = 2'-deoxy-2'-fluoro-cytidine-3'-phosphate
  modified_base 8: mod_base = OTHER; note = 2'-deoxy-2'-fluoro-uridine-3'-phosphate
  modified_base 9: mod_base = OTHER; note = 2'-deoxy-2'-fluoro-cytidine-3'-phosphate
  modified_base 10: mod_base = OTHER; note = 2'-O-methyl-uridine-3'-phosphate
  modified_base 11: mod_base = OTHER; note = 2'-O-methyl-uridine-3'-phosphate
  modified_base 12: mod_base = OTHER; note = 2'-O-methyl-adenosine-3'-phosphate
  modified_base 13: mod_base = OTHER; note = 2'-O-methyl-cytidine-3'-phosphate
  modified_base 14: mod_base = OTHER; note = 2'-O-methyl-adenosine-3'-phosphate
  modified_base 15: mod_base = OTHER; note = 2'-O-methyl-uridine-3'-phosphate
  modified_base 16: mod_base = OTHER; note = 2'-O-methyl-adenosine-3'-phosphate
  modified_base 17: mod_base = OTHER; note = 2'-O-methyl-adenosine-3'-phosphate
  modified_base 18: mod_base = OTHER; note = 2'-O-methyl-uridine-3'-phosphate
  modified_base 19: mod_base = OTHER; note = 2'-O-methyl-adenosine-3'-phosphate
gccatactcttacataata

SEQ ID NO: 1523 - RNA, 19 nt, synthetic construct
  source 1..19: mol_type = other RNA
  modified_base 1: mod_base = OTHER; note = 2'-O-methyl-adenosine-3'-phosphorothioate
  modified_base 2: mod_base = OTHER; note = 2'-O-methyl-adenosine-3'-phosphorothioate
  modified_base 3: mod_base = OTHER; note = 2'-O-methyl-uridine-3'-phosphate
  modified_base 4: mod_base = OTHER; note = 2'-O-methyl-cytidine-3'-phosphate
  modified_base 5: mod_base = OTHER; note = 2'-deoxy-2'-fluoro-uridine-3'-phosphate
  modified_base 6: mod_base = OTHER; note = 2'-O-methyl-guanosine-3'-phosphate
  modified_base 7: mod_base = OTHER; note = 2'-deoxy-2'-fluoro-uridine-3'-phosphate
  modified_base 8: mod_base = OTHER; note = 2'-deoxy-2'-fluoro-uridine-3'-phosphate
  modified_base 9: mod_base = OTHER; note = 2'-deoxy-2'-fluoro-cytidine-3'-phosphate
  modified_base 10: mod_base = OTHER; note = 2'-O-methyl-uridine-3'-phosphate
  modified_base 11: mod_base = OTHER; note = 2'-O-methyl-adenosine-3'-phosphate
  modified_base 12: mod_base = OTHER; note = 2'-O-methyl-adenosine-3'-phosphate
  modified_base 13: mod_base = OTHER; note = 2'-O-methyl-guanosine-3'-phosphate
  modified_base 14: mod_base = OTHER; note = 2'-O-methyl-adenosine-3'-phosphate
  modified_base 15: mod_base = OTHER; note = 2'-O-methyl-cytidine-3'-phosphate
  modified_base 16: mod_base = OTHER; note = 2'-O-methyl-adenosine-3'-phosphate
  modified_base 17: mod_base = OTHER; note = 2'-O-methyl-uridine-3'-phosphate
  modified_base 18: mod_base = OTHER; note = 2'-O-methyl-adenosine-3'-phosphate
  modified_base 19: mod_base = OTHER; note = 2'-O-methyl-adenosine-3'-phosphate
aatctgttctaagacataa

SEQ ID NO: 1524 - RNA, 19 nt, synthetic construct
  source 1..19: mol_type = other RNA
  modified_base 1: mod_base = OTHER; note = 2'-O-methyl-uridine-3'-phosphorothioate
  modified_base 2: mod_base = OTHER; note = 2'-O-methyl-cytidine-3'-phosphorothioate
  modified_base 3: mod_base = OTHER; note = 2'-O-methyl-uridine-3'-phosphate
  modified_base 4: mod_base = OTHER; note = 2'-O-methyl-guanosine-3'-phosphate
  modified_base 5: mod_base = OTHER; note = 2'-deoxy-2'-fluoro-uridine-3'-phosphate
  modified_base 6: mod_base = OTHER; note = 2'-O-methyl-uridine-3'-phosphate
  modified_base 7: mod_base = OTHER; note = 2'-deoxy-2'-fluoro-cytidine-3'-phosphate
  modified_base 8: mod_base = OTHER; note = 2'-deoxy-2'-fluoro-uridine-3'-phosphate
  modified_base 9: mod_base = OTHER; note = 2'-deoxy-2'-fluoro-adenosine-3'-phosphate
  modified_base 10: mod_base = OTHER; note = 2'-O-methyl-adenosine-3'-phosphate
  modified_base 11: mod_base = OTHER; note = 2'-O-methyl-guanosine-3'-phosphate
  modified_base 12: mod_base = OTHER; note = 2'-O-methyl-adenosine-3'-phosphate
  modified_base 13: mod_base = OTHER; note = 2'-O-methyl-cytidine-3'-phosphate
  modified_base 14: mod_base = OTHER; note = 2'-O-methyl-adenosine-3'-phosphate
  modified_base 15: mod_base = OTHER; note = 2'-O-methyl-uridine-3'-phosphate
  modified_base 16: mod_base = OTHER; note = 2'-O-methyl-adenosine-3'-phosphate
  modified_base 17: mod_base = OTHER; note = 2'-O-methyl-uridine-3'-phosphate
  modified_base 18: mod_base = OTHER; note = 2'-O-methyl-guanosine-3'-phosphate
  modified_base 19: mod_base = OTHER; note = 2'-O-methyl-adenosine-3'-phosphate
tctgttctaagacatatga

SEQ ID NO: 1525 - RNA, 19 nt, synthetic construct
  source 1..19: mol_type = other RNA
  modified_base 1: mod_base = OTHER; note = 2'-O-methyl-guanosine-3'-phosphorothioate
  modified_base 2: mod_base = OTHER; note = 2'-O-methyl-uridine-3'-phosphorothioate
  modified_base 3: mod_base = OTHER; note = 2'-O-methyl-uridine-3'-phosphate
  modified_base 4: mod_base = OTHER; note = 2'-O-methyl-cytidine-3'-phosphate
  modified_base 5: mod_base = OTHER; note = 2'-deoxy-2'-fluoro-uridine-3'-phosphate
  modified_base 6: mod_base = OTHER; note = 2'-O-methyl-adenosine-3'-phosphate
  modified_base 7: mod_base = OTHER; note = 2'-deoxy-2'-fluoro-adenosine-3'-phosphate
  modified_base 8: mod_base = OTHER; note = 2'-deoxy-2'-fluoro-guanosine-3'-phosphate
  modified_base 9: mod_base = OTHER; note = 2'-deoxy-2'-fluoro-adenosine-3'-phosphate
  modified_base 10: mod_base = OTHER; note = 2'-O-methyl-cytidine-3'-phosphate
  modified_base 11: mod_base = OTHER; note = 2'-O-methyl-adenosine-3'-phosphate
  modified_base 12: mod_base = OTHER; note = 2'-O-methyl-uridine-3'-phosphate
  modified_base 13: mod_base = OTHER; note = 2'-O-methyl-adenosine-3'-phosphate
  modified_base 14: mod_base = OTHER; note = 2'-O-methyl-uridine-3'-phosphate
  modified_base 15: mod_base = OTHER; note = 2'-O-methyl-guanosine-3'-phosphate
  modified_base 16: mod_base = OTHER; note = 2'-O-methyl-adenosine-3'-phosphate
  modified_base 17: mod_base = OTHER; note = 2'-O-methyl-uridine-3'-phosphate
  modified_base 18: mod_base = OTHER; note = 2'-O-methyl-cytidine-3'-phosphate
  modified_base 19: mod_base = OTHER; note = 2'-O-methyl-adenosine-3'-phosphate
gttctaagacatatgatca

SEQ ID NO: 1526 - RNA, 19 nt, synthetic construct
  source 1..19: mol_type = other RNA
  modified_base 1: mod_base = OTHER; note = 2'-O-methyl-uridine-3'-phosphorothioate
  modified_base 2: mod_base = OTHER; note = 2'-O-methyl-uridine-3'-phosphorothioate
  modified_base 3: mod_base = OTHER; note = 2'-O-methyl-cytidine-3'-phosphate
  modified_base 4: mod_base = OTHER; note = 2'-O-methyl-uridine-3'-phosphate
  modified_base 5: mod_base = OTHER; note = 2'-deoxy-2'-fluoro-adenosine-3'-phosphate
  modified_base 6: mod_base = OTHER; note = 2'-O-methyl-adenosine-3'-phosphate
  modified_base 7: mod_base = OTHER; note = 2'-deoxy-2'-fluoro-guanosine-3'-phosphate
  modified_base 8: mod_base = OTHER; note = 2'-deoxy-2'-fluoro-adenosine-3'-phosphate
  modified_base 9: mod_base = OTHER; note = 2'-deoxy-2'-fluoro-cytidine-3'-phosphate
  modified_base 10: mod_base = OTHER; note = 2'-O-methyl-adenosine-3'-phosphate
  modified_base 11: mod_base = OTHER; note = 2'-O-methyl-uridine-3'-phosphate
  modified_base 12: mod_base = OTHER; note = 2'-O-methyl-adenosine-3'-phosphate
  modified_base 13: mod_base = OTHER; note = 2'-O-methyl-uridine-3'-phosphate
  modified_base 14: mod_base = OTHER; note = 2'-O-methyl-guanosine-3'-phosphate
  modified_base 15: mod_base = OTHER; note = 2'-O-methyl-adenosine-3'-phosphate
  modified_base 16: mod_base = OTHER; note = 2'-O-methyl-uridine-3'-phosphate
  modified_base 17: mod_base = OTHER; note = 2'-O-methyl-cytidine-3'-phosphate
  modified_base 18: mod_base = OTHER; note = 2'-O-methyl-adenosine-3'-phosphate
  modified_base 19: mod_base = OTHER; note = 2'-O-methyl-adenosine-3'-phosphate
ttctaagacatatgatcaa

SEQ ID NO: 1527 - RNA, 19 nt, synthetic construct
  source 1..19: mol_type = other RNA
  modified_base 1: mod_base = OTHER; note = 2'-O-methyl-uridine-3'-phosphorothioate
  modified_base 2: mod_base = OTHER; note = 2'-O-methyl-cytidine-3'-phosphorothioate
  modified_base 3: mod_base = OTHER; note = 2'-O-methyl-uridine-3'-phosphate
  modified_base 4: mod_base = OTHER; note = 2'-O-methyl-adenosine-3'-phosphate
  modified_base 5: mod_base = OTHER; note = 2'-deoxy-2'-fluoro-adenosine-3'-phosphate
  modified_base 6: mod_base = OTHER; note = 2'-O-methyl-guanosine-3'-phosphate
  modified_base 7: mod_base = OTHER; note = 2'-deoxy-2'-fluoro-adenosine-3'-phosphate
  modified_base 8: mod_base = OTHER; note = 2'-deoxy-2'-fluoro-cytidine-3'-phosphate
  modified_base 9: mod_base = OTHER; note = 2'-deoxy-2'-fluoro-adenosine-3'-phosphate
  modified_base 10: mod_base = OTHER; note = 2'-O-methyl-uridine-3'-phosphate
  modified_base 11: mod_base = OTHER; note = 2'-O-methyl-adenosine-3'-phosphate
  modified_base 12: mod_base = OTHER; note = 2'-O-methyl-uridine-3'-phosphate
  modified_base 13: mod_base = OTHER; note = 2'-O-methyl-guanosine-3'-phosphate
  modified_base 14: mod_base = OTHER; note = 2'-O-methyl-adenosine-3'-phosphate
  modified_base 15: mod_base = OTHER; note = 2'-O-methyl-uridine-3'-phosphate
  modified_base 16: mod_base = OTHER; note = 2'-O-methyl-cytidine-3'-phosphate
  modified_base 17: mod_base = OTHER; note = 2'-O-methyl-adenosine-3'-phosphate
  modified_base 18: mod_base = OTHER; note = 2'-O-methyl-adenosine-3'-phosphate
  modified_base 19: mod_base = OTHER; note = 2'-O-methyl-adenosine-3'-phosphate
tctaagacatatgatcaaa

SEQ ID NO: 1528 - RNA, 19 nt, synthetic construct
  source 1..19: mol_type = other RNA
  modified_base 1: mod_base = OTHER; note = 2'-O-methyl-adenosine-3'-phosphorothioate
  modified_base 2: mod_base = OTHER; note = 2'-O-methyl-guanosine-3'-phosphorothioate
  modified_base 3: mod_base = OTHER; note = 2'-O-methyl-adenosine-3'-phosphate
  modified_base 4: mod_base = OTHER; note = 2'-O-methyl-cytidine-3'-phosphate
  modified_base 5: mod_base = OTHER; note = 2'-deoxy-2'-fluoro-adenosine-3'-phosphate
  modified_base 6: mod_base = OTHER; note = 2'-O-methyl-uridine-3'-phosphate
  modified_base 7: mod_base = OTHER; note = 2'-deoxy-2'-fluoro-adenosine-3'-phosphate
  modified_base 8: mod_base = OTHER; note = 2'-deoxy-2'-fluoro-uridine-3'-phosphate
  modified_base 9: mod_base = OTHER; note = 2'-deoxy-2'-fluoro-guanosine-3'-phosphate
  modified_base 10: mod_base = OTHER; note = 2'-O-methyl-adenosine-3'-phosphate
  modified_base 11: mod_base = OTHER; note = 2'-O-methyl-uridine-3'-phosphate
  modified_base 12: mod_base = OTHER; note = 2'-O-methyl-cytidine-3'-phosphate
  modified_base 13: mod_base = OTHER; note = 2'-O-methyl-adenosine-3'-phosphate
  modified_base 14: mod_base = OTHER; note = 2'-O-methyl-adenosine-3'-phosphate
  modified_base 15: mod_base = OTHER; note = 2'-O-methyl-cytidine-3'-phosphate
  modified_base 16: mod_base = OTHER; note = 2'-O-methyl-adenosine-3'-phosphate
  modified_base 17: mod_base = OTHER; note = 2'-O-methyl-guanosine-3'-phosphate
  modified_base 18: mod_base = OTHER; note = 2'-O-methyl-adenosine-3'-phosphate
  modified_base 19: mod_base = OTHER; note = 2'-O-methyl-adenosine-3'-phosphate
agacatatgatcaacagaa

SEQ ID NO: 1529 - RNA, 19 nt, synthetic construct
  source 1..19: mol_type = other RNA
  modified_base 1: mod_base = OTHER; note = 2'-O-methyl-guanosine-3'-phosphorothioate
  modified_base 2: mod_base = OTHER; note = 2'-O-methyl-adenosine-3'-phosphorothioate
  modified_base 3: mod_base = OTHER; note = 2'-O-methyl-cytidine-3'-phosphate
  modified_base 4: mod_base = OTHER; note = 2'-O-methyl-adenosine-3'-phosphate
  modified_base 5: mod_base = OTHER; note = 2'-deoxy-2'-fluoro-uridine-3'-phosphate
  modified_base 6: mod_base = OTHER; note = 2'-O-methyl-adenosine-3'-phosphate
  modified_base 7: mod_base = OTHER; note = 2'-deoxy-2'-fluoro-uridine-3'-phosphate
  modified_base 8: mod_base = OTHER; note = 2'-deoxy-2'-fluoro-guanosine-3'-phosphate
  modified_base 9: mod_base = OTHER; note = 2'-deoxy-2'-fluoro-adenosine-3'-phosphate
  modified_base 10: mod_base = OTHER; note = 2'-O-methyl-uridine-3'-phosphate
  modified_base 11: mod_base = OTHER; note = 2'-O-methyl-cytidine-3'-phosphate
  modified_base 12: mod_base = OTHER; note = 2'-O-methyl-adenosine-3'-phosphate
  modified_base 13: mod_base = OTHER; note = 2'-O-methyl-adenosine-3'-phosphate
  modified_base 14: mod_base = OTHER; note = 2'-O-methyl-cytidine-3'-phosphate
  modified_base 15: mod_base = OTHER; note = 2'-O-methyl-adenosine-3'-phosphate
  modified_base 16: mod_base = OTHER; note = 2'-O-methyl-guanosine-3'-phosphate
  modified_base 17: mod_base = OTHER; note = 2'-O-methyl-adenosine-3'-phosphate
  modified_base 18: mod_base = OTHER; note = 2'-O-methyl-uridine-3'-phosphate
  modified_base 19: mod_base = OTHER; note = 2'-O-methyl-adenosine-3'-phosphate
gacatatgatcaacagata

SEQ ID NO: 1530 - RNA, 19 nt, synthetic construct
  source 1..19: mol_type = other RNA
  modified_base 1: mod_base = OTHER; note = 2'-O-methyl-adenosine-3'-phosphorothioate
  modified_base 2: mod_base = OTHER; note = 2'-O-methyl-cytidine-3'-phosphorothioate
  modified_base 3: mod_base = OTHER; note = 2'-O-methyl-adenosine-3'-phosphate
  modified_base 4: mod_base = OTHER; note = 2'-O-methyl-uridine-3'-phosphate
  modified_base 5: mod_base = OTHER; note = 2'-deoxy-2'-fluoro-adenosine-3'-phosphate
  modified_base 6: mod_base = OTHER; note = 2'-O-methyl-uridine-3'-phosphate
  modified_base 7: mod_base = OTHER; note = 2'-deoxy-2'-fluoro-guanosine-3'-phosphate
  modified_base 8: mod_base = OTHER; note = 2'-deoxy-2'-fluoro-adenosine-3'-phosphate
  modified_base 9: mod_base = OTHER; note = 2'-deoxy-2'-fluoro-uridine-3'-phosphate
  modified_base 10: mod_base = OTHER; note = 2'-O-methyl-cytidine-3'-phosphate
  modified_base 11: mod_base = OTHER; note = 2'-O-methyl-adenosine-3'-phosphate
  modified_base 12: mod_base = OTHER; note = 2'-O-methyl-adenosine-3'-phosphate
  modified_base 13: mod_base = OTHER; note = 2'-O-methyl-cytidine-3'-phosphate
  modified_base 14: mod_base = OTHER; note = 2'-O-methyl-adenosine-3'-phosphate
  modified_base 15: mod_base = OTHER; note = 2'-O-methyl-guanosine-3'-phosphate
  modified_base 16: mod_base = OTHER; note = 2'-O-methyl-adenosine-3'-phosphate
  modified_base 17: mod_base = OTHER; note = 2'-O-methyl-uridine-3'-phosphate
  modified_base 18: mod_base = OTHER; note = 2'-O-methyl-guanosine-3'-phosphate
  modified_base 19: mod_base = OTHER; note = 2'-O-methyl-adenosine-3'-phosphate
acatatgatcaacagatga

SEQ ID NO: 1531 - RNA, 19 nt, synthetic construct
  source 1..19: mol_type = other RNA
  modified_base 1: mod_base = OTHER; note = 2'-O-methyl-uridine-3'-phosphorothioate
  modified_base 2: mod_base = OTHER; note = 2'-O-methyl-adenosine-3'-phosphorothioate
  modified_base 3: mod_base = OTHER; note = 2'-O-methyl-uridine-3'-phosphate
  modified_base 4: mod_base = OTHER; note = 2'-O-methyl-guanosine-3'-phosphate
  modified_base 5: mod_base = OTHER; note = 2'-deoxy-2'-fluoro-adenosine-3'-phosphate
  modified_base 6: mod_base = OTHER; note = 2'-O-methyl-uridine-3'-phosphate
  modified_base 7: mod_base = OTHER; note = 2'-deoxy-2'-fluoro-cytidine-3'-phosphate
  modified_base 8: mod_base = OTHER; note = 2'-deoxy-2'-fluoro-adenosine-3'-phosphate
  modified_base 9: mod_base = OTHER; note = 2'-deoxy-2'-fluoro-adenosine-3'-phosphate
  modified_base 10: mod_base = OTHER; note = 2'-O-methyl-cytidine-3'-phosphate
  modified_base 11: mod_base = OTHER; note = 2'-O-methyl-adenosine-3'-phosphate
  modified_base 12: mod_base = OTHER; note = 2'-O-methyl-guanosine-3'-phosphate
  modified_base 13: mod_base = OTHER; note = 2'-O-methyl-adenosine-3'-phosphate
  modified_base 14: mod_base = OTHER; note = 2'-O-methyl-uridine-3'-phosphate
  modified_base 15: mod_base = OTHER; note = 2'-O-methyl-guanosine-3'-phosphate
  modified_base 16: mod_base = OTHER; note = 2'-O-methyl-adenosine-3'-phosphate
  modified_base 17: mod_base = OTHER; note = 2'-O-methyl-guanosine-3'-phosphate
  modified_base 18: mod_base = OTHER; note = 2'-O-methyl-adenosine-3'-phosphate
  modified_base 19: mod_base = OTHER; note = 2'-O-methyl-adenosine-3'-phosphate
tatgatcaacagatgagaa

SEQ ID NO: 1532 - RNA, 19 nt, synthetic construct
  source 1..19: mol_type = other RNA
  modified_base 1: mod_base = OTHER; note = 2'-O-methyl-adenosine-3'-phosphorothioate
  modified_base 2: mod_base = OTHER; note = 2'-O-methyl-uridine-3'-phosphorothioate
  modified_base 3: mod_base = OTHER; note = 2'-O-methyl-guanosine-3'-phosphate
  modified_base 4: mod_base = OTHER; note = 2'-O-methyl-adenosine-3'-phosphate
  modified_base 5: mod_base = OTHER; note = 2'-deoxy-2'-fluoro-uridine-3'-phosphate
  modified_base 6: mod_base = OTHER; note = 2'-O-methyl-cytidine-3'-phosphate
  modified_base 7: mod_base = OTHER; note = 2'-deoxy-2'-fluoro-adenosine-3'-phosphate
  modified_base 8: mod_base = OTHER; note = 2'-deoxy-2'-fluoro-adenosine-3'-phosphate
  modified_base 9: mod_base = OTHER; note = 2'-deoxy-2'-fluoro-cytidine-3'-phosphate
  modified_base 10: mod_base = OTHER; note = 2'-O-methyl-adenosine-3'-phosphate
  modified_base 11: mod_base = OTHER; note = 2'-O-methyl-guanosine-3'-phosphate
  modified_base 12: mod_base = OTHER; note = 2'-O-methyl-adenosine-3'-phosphate
  modified_base 13: mod_base = OTHER; note = 2'-O-methyl-uridine-3'-phosphate
  modified_base 14: mod_base = OTHER; note = 2'-O-methyl-guanosine-3'-phosphate
  modified_base 15: mod_base = OTHER; note = 2'-O-methyl-adenosine-3'-phosphate
  modified_base 16: mod_base = OTHER; note = 2'-O-methyl-guanosine-3'-phosphate
  modified_base 17: mod_base = OTHER; note = 2'-O-methyl-adenosine-3'-phosphate
  modified_base 18: mod_base = OTHER; note = 2'-O-methyl-adenosine-3'-phosphate
  modified_base 19: mod_base = OTHER; note = 2'-O-methyl-adenosine-3'-phosphate
atgatcaacagatgagaaa

SEQ ID NO: 1533 - RNA, 19 nt, synthetic construct
  source 1..19: mol_type = other RNA
  modified_base 1: mod_base = OTHER; note = 2'-O-methyl-adenosine-3'-phosphorothioate
  modified_base 2: mod_base = OTHER; note = 2'-O-methyl-cytidine-3'-phosphorothioate
  modified_base 3: mod_base = OTHER; note = 2'-O-methyl-adenosine-3'-phosphate
  modified_base 4: mod_base = OTHER; note = 2'-O-methyl-guanosine-3'-phosphate
  modified_base 5: mod_base = OTHER; note = 2'-deoxy-2'-fluoro-uridine-3'-phosphate
  modified_base 6: mod_base = OTHER; note = 2'-O-methyl-guanosine-3'-phosphate
  modified_base 7: mod_base = OTHER; note = 2'-deoxy-2'-fluoro-adenosine-3'-phosphate
  modified_base 8: mod_base = OTHER; note = 2'-deoxy-2'-fluoro-guanosine-3'-phosphate
  modified_base 9: mod_base = OTHER; note = 2'-deoxy-2'-fluoro-adenosine-3'-phosphate
  modified_base 10: mod_base = OTHER; note = 2'-O-methyl-uridine-3'-phosphate
  modified_base 11: mod_base = OTHER; note = 2'-O-methyl-uridine-3'-phosphate
  modified_base 12: mod_base = OTHER; note = 2'-O-methyl-adenosine-3'-phosphate
  modified_base 13: mod_base = OTHER; note = 2'-O-methyl-guanosine-3'-phosphate
  modified_base 14: mod_base = OTHER; note = 2'-O-methyl-uridine-3'-phosphate
  modified_base 15: mod_base = OTHER; note = 2'-O-methyl-cytidine-3'-phosphate
  modified_base 16: mod_base = OTHER; note = 2'-O-methyl-adenosine-3'-phosphate
  modified_base 17: mod_base = OTHER; note = 2'-O-methyl-uridine-3'-phosphate
  modified_base 18: mod_base = OTHER; note = 2'-O-methyl-adenosine-3'-phosphate
  modified_base 19: mod_base = OTHER; note = 2'-O-methyl-adenosine-3'-phosphate
acagtgagattagtcataa

SEQ ID NO: 1534 - RNA, 19 nt, synthetic construct
  source 1..19: mol_type = other RNA
  modified_base 1: mod_base = OTHER; note = 2'-O-methyl-cytidine-3'-phosphorothioate
  modified_base 2: mod_base = OTHER; note = 2'-O-methyl-adenosine-3'-phosphorothioate
  modified_base 3: mod_base = OTHER; note = 2'-O-methyl-guanosine-3'-phosphate
  modified_base 4: mod_base = OTHER; note = 2'-O-methyl-uridine-3'-phosphate
  modified_base 5: mod_base = OTHER; note = 2'-deoxy-2'-fluoro-guanosine-3'-phosphate
  modified_base 6: mod_base = OTHER; note = 2'-O-methyl-adenosine-3'-phosphate
  modified_base 7: mod_base = OTHER; note = 2'-deoxy-2'-fluoro-guanosine-3'-phosphate
  modified_base 8: mod_base = OTHER; note = 2'-deoxy-2'-fluoro-adenosine-3'-phosphate
  modified_base 9: mod_base = OTHER; note = 2'-deoxy-2'-fluoro-uridine-3'-phosphate
  modified_base 10: mod_base = OTHER; note = 2'-O-methyl-uridine-3'-phosphate
  modified_base 11: mod_base = OTHER; note = 2'-O-methyl-adenosine-3'-phosphate
  modified_base 12: mod_base = OTHER; note = 2'-O-methyl-guanosine-3'-phosphate
  modified_base 13: mod_base = OTHER; note = 2'-O-methyl-uridine-3'-phosphate
  modified_base 14: mod_base = OTHER; note = 2'-O-methyl-cytidine-3'-phosphate
  modified_base 15: mod_base = OTHER; note = 2'-O-methyl-adenosine-3'-phosphate
  modified_base 16: mod_base = OTHER; note = 2'-O-methyl-uridine-3'-phosphate
  modified_base 17: mod_base = OTHER; note = 2'-O-methyl-adenosine-3'-phosphate
  modified_base 18: mod_base = OTHER; note = 2'-O-methyl-uridine-3'-phosphate
  modified_base 19: mod_base = OTHER; note = 2'-O-methyl-adenosine-3'-phosphate
cagtgagattagtcatata

SEQ ID NO: 1535 - RNA, 19 nt, synthetic construct
  source 1..19: mol_type = other RNA
  modified_base 1: mod_base = OTHER; note = 2'-O-methyl-guanosine-3'-phosphorothioate
  modified_base 2: mod_base = OTHER; note = 2'-O-methyl-uridine-3'-phosphorothioate
  modified_base 3: mod_base = OTHER; note = 2'-O-methyl-guanosine-3'-phosphate
  modified_base 4: mod_base = OTHER; note = 2'-O-methyl-adenosine-3'-phosphate
  modified_base 5: mod_base = OTHER; note = 2'-deoxy-2'-fluoro-guanosine-3'-phosphate
  modified_base 6: mod_base = OTHER; note = 2'-O-methyl-adenosine-3'-phosphate
  modified_base 7: mod_base = OTHER; note = 2'-deoxy-2'-fluoro-uridine-3'-phosphate
  modified_base 8: mod_base = OTHER; note = 2'-deoxy-2'-fluoro-uridine-3'-phosphate
  modified_base 9: mod_base = OTHER; note = 2'-deoxy-2'-fluoro-adenosine-3'-phosphate
  modified_base 10: mod_base = OTHER; note = 2'-O-methyl-guanosine-3'-phosphate
  modified_base 11: mod_base = OTHER; note = 2'-O-methyl-uridine-3'-phosphate
  modified_base 12: mod_base = OTHER; note = 2'-O-methyl-cytidine-3'-phosphate
  modified_base 13: mod_base = OTHER; note = 2'-O-methyl-adenosine-3'-phosphate
  modified_base 14: mod_base = OTHER; note = 2'-O-methyl-uridine-3'-phosphate
  modified_base 15: mod_base = OTHER; note = 2'-O-methyl-adenosine-3'-phosphate
  modified_base 16: mod_base = OTHER; note = 2'-O-methyl-uridine-3'-phosphate
  modified_base 17: mod_base = OTHER; note = 2'-O-methyl-cytidine-3'-phosphate
  modified_base 18: mod_base = OTHER; note = 2'-O-methyl-adenosine-3'-phosphate
  modified_base 19: mod_base = OTHER; note = 2'-O-methyl-adenosine-3'-phosphate
gtgagattagtcatatcaa

SEQ ID NO: 1536 - RNA, 19 nt, synthetic construct
  source 1..19: mol_type = other RNA
  modified_base 1: mod_base = OTHER; note = 2'-O-methyl-uridine-3'-phosphorothioate
  modified_base 2: mod_base = OTHER; note = 2'-O-methyl-adenosine-3'-phosphorothioate
  modified_base 3: mod_base = OTHER; note = 2'-O-methyl-cytidine-3'-phosphate
  modified_base 4: mod_base = OTHER; note = 2'-O-methyl-cytidine-3'-phosphate
  modified_base 5: mod_base = OTHER; note = 2'-deoxy-2'-fluoro-uridine-3'-phosphate
  modified_base 6: mod_base = OTHER; note = 2'-O-methyl-adenosine-3'-phosphate
  modified_base 7: mod_base = OTHER; note = 2'-deoxy-2'-fluoro-guanosine-3'-phosphate
  modified_base 8: mod_base = OTHER; note = 2'-deoxy-2'-fluoro-cytidine-3'-phosphate
  modified_base 9: mod_base = OTHER; note = 2'-deoxy-2'-fluoro-uridine-3'-phosphate
  modified_base 10: mod_base = OTHER; note = 2'-O-methyl-uridine-3'-phosphate
  modified_base 11: mod_base = OTHER; note = 2'-O-methyl-adenosine-3'-phosphate
  modified_base 12: mod_base = OTHER; note = 2'-O-methyl-cytidine-3'-phosphate
  modified_base 13: mod_base = OTHER; note = 2'-O-methyl-cytidine-3'-phosphate
  modified_base 14: mod_base = OTHER; note = 2'-O-methyl-adenosine-3'-phosphate
  modified_base 15: mod_base = OTHER; note = 2'-O-methyl-uridine-3'-phosphate
  modified_base 16: mod_base = OTHER; note = 2'-O-methyl-adenosine-3'-phosphate
  modified_base 17: mod_base = OTHER; note = 2'-O-methyl-cytidine-3'-phosphate
  modified_base 18: mod_base = OTHER; note = 2'-O-methyl-uridine-3'-phosphate
  modified_base 19: mod_base = OTHER; note = 2'-O-methyl-adenosine-3'-phosphate
tacctagcttaccatacta

SEQ ID NO: 1537 - RNA, 19 nt, synthetic construct
  source 1..19: mol_type = other RNA
  modified_base 1: mod_base = OTHER; note = 2'-O-methyl-adenosine-3'-phosphorothioate
  modified_base 2: mod_base = OTHER; note = 2'-O-methyl-cytidine-3'-phosphorothioate
  modified_base 3: mod_base = OTHER; note = 2'-O-methyl-cytidine-3'-phosphate
  modified_base 4: mod_base = OTHER; note = 2'-O-methyl-uridine-3'-phosphate
  modified_base 5: mod_base = OTHER; note = 2'-deoxy-2'-fluoro-adenosine-3'-phosphate
  modified_base 6: mod_base = OTHER; note = 2'-O-methyl-guanosine-3'-phosphate
  modified_base 7: mod_base = OTHER; note = 2'-deoxy-2'-fluoro-cytidine-3'-phosphate
  modified_base 8: mod_base = OTHER; note = 2'-deoxy-2'-fluoro-uridine-3'-phosphate
  modified_base 9: mod_base = OTHER; note = 2'-deoxy-2'-fluoro-uridine-3'-phosphate
  modified_base 10: mod_base = OTHER; note = 2'-O-methyl-adenosine-3'-phosphate
  modified_base 11: mod_base = OTHER; note = 2'-O-methyl-cytidine-3'-phosphate
  modified_base 12: mod_base = OTHER; note = 2'-O-methyl-cytidine-3'-phosphate
  modified_base 13: mod_base = OTHER; note = 2'-O-methyl-adenosine-3'-phosphate
  modified_base 14: mod_base = OTHER; note = 2'-O-methyl-uridine-3'-phosphate
  modified_base 15: mod_base = OTHER; note = 2'-O-methyl-adenosine-3'-phosphate
  modified_base 16: mod_base = OTHER; note = 2'-O-methyl-cytidine-3'-phosphate
  modified_base 17: mod_base = OTHER; note = 2'-O-methyl-uridine-3'-phosphate
  modified_base 18: mod_base = OTHER; note = 2'-O-methyl-adenosine-3'-phosphate
  modified_base 19: mod_base = OTHER; note = 2'-O-methyl-adenosine-3'-phosphate
acctagcttaccatactaa

SEQ ID NO: 1538 - RNA, 19 nt, synthetic construct
  source 1..19: mol_type = other RNA
  modified_base 1: mod_base = OTHER; note = 2'-O-methyl-cytidine-3'-phosphorothioate
  modified_base 2: mod_base = OTHER; note = 2'-O-methyl-cytidine-3'-phosphorothioate
  modified_base 3: mod_base = OTHER; note = 2'-O-methyl-uridine-3'-phosphate
  modified_base 4: mod_base = OTHER; note = 2'-O-methyl-adenosine-3'-phosphate
  modified_base 5: mod_base = OTHER; note = 2'-deoxy-2'-fluoro-guanosine-3'-phosphate
  modified_base 6: mod_base = OTHER; note = 2'-O-methyl-cytidine-3'-phosphate
  modified_base 7: mod_base = OTHER; note = 2'-deoxy-2'-fluoro-uridine-3'-phosphate
  modified_base 8: mod_base = OTHER; note = 2'-deoxy-2'-fluoro-uridine-3'-phosphate
  modified_base 9: mod_base = OTHER; note = 2'-deoxy-2'-fluoro-adenosine-3'-phosphate
  modified_base 10: mod_base = OTHER; note = 2'-O-methyl-cytidine-3'-phosphate
  modified_base 11: mod_base = OTHER; note = 2'-O-methyl-cytidine-3'-phosphate
  modified_base 12: mod_base = OTHER; note = 2'-O-methyl-adenosine-3'-phosphate
  modified_base 13: mod_base = OTHER; note = 2'-O-methyl-uridine-3'-phosphate
  modified_base 14: mod_base = OTHER; note = 2'-O-methyl-adenosine-3'-phosphate
  modified_base 15: mod_base = OTHER; note = 2'-O-methyl-cytidine-3'-phosphate
  modified_base 16: mod_base = OTHER; note = 2'-O-methyl-uridine-3'-phosphate
  modified_base 17: mod_base = OTHER; note = 2'-O-methyl-adenosine-3'-phosphate
  modified_base 18: mod_base = OTHER; note = 2'-O-methyl-uridine-3'-phosphate
  modified_base 19: mod_base = OTHER; note = 2'-O-methyl-adenosine-3'-phosphate
cctagcttaccatactata

SEQ ID NO: 1539 - RNA, 19 nt, synthetic construct
  source 1..19: mol_type = other RNA
  modified_base 1: mod_base = OTHER; note = 2'-O-methyl-cytidine-3'-phosphorothioate
  modified_base 2: mod_base = OTHER; note = 2'-O-methyl-uridine-3'-phosphorothioate
  modified_base 3: mod_base = OTHER; note = 2'-O-methyl-adenosine-3'-phosphate
  modified_base 4: mod_base = OTHER; note = 2'-O-methyl-guanosine-3'-phosphate
  modified_base 5: mod_base = OTHER; note = 2'-deoxy-2'-fluoro-cytidine-3'-phosphate
  modified_base 6: mod_base = OTHER; note = 2'-O-methyl-uridine-3'-phosphate
  modified_base 7: mod_base = OTHER; note = 2'-deoxy-2'-fluoro-uridine-3'-phosphate
  modified_base 8: mod_base = OTHER; note = 2'-deoxy-2'-fluoro-adenosine-3'-phosphate
  modified_base 9: mod_base = OTHER; note = 2'-deoxy-2'-fluoro-cytidine-3'-phosphate
  modified_base 10: mod_base = OTHER; note = 2'-O-methyl-cytidine-3'-phosphate
  modified_base 11: mod_base = OTHER; note = 2'-O-methyl-adenosine-3'-phosphate
  modified_base 12: mod_base = OTHER; note = 2'-O-methyl-uridine-3'-phosphate
  modified_base 13: mod_base = OTHER; note = 2'-O-methyl-adenosine-3'-phosphate
  modified_base 14: mod_base = OTHER; note = 2'-O-methyl-cytidine-3'-phosphate
  modified_base 15: mod_base = OTHER; note = 2'-O-methyl-uridine-3'-phosphate
  modified_base 16: mod_base = OTHER; note = 2'-O-methyl-adenosine-3'-phosphate
  modified_base 17: mod_base = OTHER; note = 2'-O-methyl-uridine-3'-phosphate
  modified_base 18: mod_base = OTHER; note = 2'-O-methyl-adenosine-3'-phosphate
  modified_base 19: mod_base = OTHER; note = 2'-O-methyl-adenosine-3'-phosphate
ctagcttaccatactataa

SEQ ID NO: 1540 - RNA, 19 nt, synthetic construct
  source 1..19: mol_type = other RNA
  modified_base 1: mod_base = OTHER; note = 2'-O-methyl-adenosine-3'-phosphorothioate
  modified_base 2: mod_base = OTHER; note = 2'-O-methyl-guanosine-3'-phosphorothioate
  modified_base 3: mod_base = OTHER; note = 2'-O-methyl-cytidine-3'-phosphate
  modified_base 4: mod_base = OTHER; note = 2'-O-methyl-uridine-3'-phosphate
  modified_base 5: mod_base = OTHER; note = 2'-deoxy-2'-fluoro-uridine-3'-phosphate
  modified_base 6: mod_base = OTHER; note = 2'-O-methyl-adenosine-3'-phosphate
  modified_base 7: mod_base = OTHER; note = 2'-deoxy-2'-fluoro-cytidine-3'-phosphate
  modified_base 8: mod_base = OTHER; note = 2'-deoxy-2'-fluoro-cytidine-3'-phosphate
  modified_base 9: mod_base = OTHER; note = 2'-deoxy-2'-fluoro-adenosine-3'-phosphate
  modified_base 10: mod_base = OTHER; note = 2'-O-methyl-uridine-3'-phosphate
  modified_base 11: mod_base = OTHER; note = 2'-O-methyl-adenosine-3'-phosphate
  modified_base 12: mod_base = OTHER; note = 2'-O-methyl-cytidine-3'-phosphate
  modified_base 13: mod_base = OTHER; note = 2'-O-methyl-uridine-3'-phosphate
  modified_base 14: mod_base = OTHER; note = 2'-O-methyl-adenosine-3'-phosphate
  modified_base 15: mod_base = OTHER; note = 2'-O-methyl-uridine-3'-phosphate
  modified_base 16: mod_base = OTHER; note = 2'-O-methyl-adenosine-3'-phosphate
  modified_base 17: mod_base = OTHER; note = 2'-O-methyl-uridine-3'-phosphate
  modified_base 18: mod_base = OTHER; note = 2'-O-methyl-cytidine-3'-phosphate
  modified_base 19: mod_base = OTHER; note = 2'-O-methyl-adenosine-3'-phosphate
agcttaccatactatatca

SEQ ID NO: 1541 - RNA, 19 nt, synthetic construct
  source 1..19: mol_type = other RNA
  modified_base 1: mod_base = OTHER; note = 2'-O-methyl-uridine-3'-phosphorothioate
  modified_base 2: mod_base = OTHER; note = 2'-O-methyl-cytidine-3'-phosphorothioate
  modified_base 3: mod_base = OTHER; note = 2'-O-methyl-uridine-3'-phosphate
  modified_base 4: mod_base = OTHER; note = 2'-O-methyl-cytidine-3'-phosphate
  modified_base 5: mod_base = OTHER; note = 2'-deoxy-2'-fluoro-uridine-3'-phosphate
  modified_base 6: mod_base = OTHER; note = 2'-O-methyl-cytidine-3'-phosphate
  modified_base 7: mod_base = OTHER; note = 2'-deoxy-2'-fluoro-uridine-3'-phosphate
  modified_base 8: mod_base = OTHER; note = 2'-deoxy-2'-fluoro-cytidine-3'-phosphate
  modified_base 9: mod_base = OTHER; note = 2'-deoxy-2'-fluoro-cytidine-3'-phosphate
  modified_base 10: mod_base = OTHER; note = 2'-O-methyl-adenosine-3'-phosphate
  modified_base 11: mod_base = OTHER; note = 2'-O-methyl-adenosine-3'-phosphate
  modified_base 12: mod_base = OTHER; note = 2'-O-methyl-adenosine-3'-phosphate
  modified_base 13: mod_base = OTHER; note = 2'-O-methyl-uridine-3'-phosphate
  modified_base 14: mod_base = OTHER; note = 2'-O-methyl-adenosine-3'-phosphate
  modified_base 15: mod_base = OTHER; note = 2'-O-methyl-uridine-3'-phosphate
  modified_base 16: mod_base = OTHER; note = 2'-O-methyl-uridine-3'-phosphate
  modified_base 17: mod_base = OTHER; note = 2'-O-methyl-adenosine-3'-phosphate
  modified_base 18: mod_base = OTHER; note = 2'-O-methyl-adenosine-3'-phosphate
  modified_base 19: mod_base = OTHER; note = 2'-O-methyl-adenosine-3'-phosphate
tctctctccaaatattaaa

SEQ ID NO: 1542 - RNA, 19 nt, synthetic construct
  source 1..19: mol_type = other RNA
  modified_base 1: mod_base = OTHER; note = 2'-O-methyl-adenosine-3'-phosphorothioate
  modified_base 2: mod_base = OTHER; note = 2'-O-methyl-uridine-3'-phosphorothioate
  modified_base 3: mod_base = OTHER; note = 2'-O-methyl-guanosine-3'-phosphate
  modified_base 4: mod_base = OTHER; note = 2'-O-methyl-adenosine-3'-phosphate
  modified_base 5: mod_base = OTHER; note = 2'-deoxy-2'-fluoro-adenosine-3'-phosphate
  modified_base 6: mod_base = OTHER; note = 2'-O-methyl-cytidine-3'-phosphate
  modified_base 7: mod_base = OTHER; note = 2'-deoxy-2'-fluoro-uridine-3'-phosphate
  modified_base 8: mod_base = OTHER; note = 2'-deoxy-2'-fluoro-uridine-3'-phosphate
  modified_base 9: mod_base = OTHER; note = 2'-deoxy-2'-fluoro-guanosine-3'-phosphate
  modified_base 10: mod_base = OTHER; note = 2'-O-methyl-uridine-3'-phosphate
  modified_base 11: mod_base = OTHER; note = 2'-O-methyl-uridine-3'-phosphate
  modified_base 12: mod_base = OTHER; note = 2'-O-methyl-guanosine-3'-phosphate
  modified_base 13: mod_base = OTHER; note = 2'-O-methyl-guanosine-3'-phosphate
  modified_base 14: mod_base = OTHER; note = 2'-O-methyl-cytidine-3'-phosphate
  modified_base 15: mod_base = OTHER; note = 2'-O-methyl-cytidine-3'-phosphate
  modified_base 16: mod_base = OTHER; note = 2'-O-methyl-cytidine-3'-phosphate
  modified_base 17: mod_base = OTHER; note = 2'-O-methyl-adenosine-3'-phosphate
  modified_base 18: mod_base = OTHER; note = 2'-O-methyl-uridine-3'-phosphate
  modified_base 19: mod_base = OTHER; note = 2'-O-methyl-adenosine-3'-phosphate
atgaacttgttggcccata

SEQ ID NO: 1543 - RNA, 19 nt, synthetic construct
  source 1..19: mol_type = other RNA
  modified_base 1: mod_base = OTHER; note = 2'-O-methyl-uridine-3'-phosphorothioate
  modified_base 2: mod_base = OTHER; note = 2'-O-methyl-guanosine-3'-phosphorothioate
  modified_base 3: mod_base = OTHER; note = 2'-O-methyl-adenosine-3'-phosphate
  modified_base 4: mod_base = OTHER; note = 2'-O-methyl-adenosine-3'-phosphate
  modified_base 5: mod_base = OTHER; note = 2'-deoxy-2'-fluoro-cytidine-3'-phosphate
  modified_base 6: mod_base = OTHER; note = 2'-O-methyl-uridine-3'-phosphate
  modified_base 7: mod_base = OTHER; note = 2'-deoxy-2'-fluoro-uridine-3'-phosphate
  modified_base 8: mod_base = OTHER; note = 2'-deoxy-2'-fluoro-guanosine-3'-phosphate
  modified_base 9: mod_base = OTHER; note = 2'-deoxy-2'-fluoro-uridine-3'-phosphate
  modified_base 10: mod_base = OTHER; note = 2'-O-methyl-uridine-3'-phosphate
  modified_base 11: mod_base = OTHER; note = 2'-O-methyl-guanosine-3'-phosphate
  modified_base 12: mod_base = OTHER; note = 2'-O-methyl-guanosine-3'-phosphate
  modified_base 13: mod_base = OTHER; note = 2'-O-methyl-cytidine-3'-phosphate
  modified_base 14: mod_base = OTHER; note = 2'-O-methyl-cytidine-3'-phosphate
  modified_base 15: mod_base = OTHER; note = 2'-O-methyl-cytidine-3'-phosphate
  modified_base 16: mod_base = OTHER; note = 2'-O-methyl-adenosine-3'-phosphate
  modified_base 17: mod_base = OTHER; note = 2'-O-methyl-uridine-3'-phosphate
  modified_base 18: mod_base = OTHER; note = 2'-O-methyl-cytidine-3'-phosphate
  modified_base 19: mod_base = OTHER; note = 2'-O-methyl-adenosine-3'-phosphate
tgaacttgttggcccatca

SEQ ID NO: 1544 - RNA, 19 nt, synthetic construct
  source 1..19: mol_type = other RNA
  modified_base 1: mod_base = OTHER; note = 2'-O-methyl-guanosine-3'-phosphorothioate
  modified_base 2: mod_base = OTHER; note = 2'-O-methyl-adenosine-3'-phosphorothioate
  modified_base 3: mod_base = OTHER; note = 2'-O-methyl-adenosine-3'-phosphate
  modified_base 4: mod_base = OTHER; note = 2'-O-methyl-cytidine-3'-phosphate
  modified_base 5: mod_base = OTHER; note = 2'-deoxy-2'-fluoro-uridine-3'-phosphate
  modified_base 6: mod_base = OTHER; note = 2'-O-methyl-uridine-3'-phosphate
  modified_base 7: mod_base = OTHER; note = 2'-deoxy-2'-fluoro-guanosine-3'-phosphate
  modified_base 8: mod_base = OTHER; note = 2'-deoxy-2'-fluoro-uridine-3'-phosphate
  modified_base 9: mod_base = OTHER; note = 2'-deoxy-2'-fluoro-uridine-3'-phosphate
  modified_base 10: mod_base = OTHER; note = 2'-O-methyl-guanosine-3'-phosphate
  modified_base 11: mod_base = OTHER; note = 2'-O-methyl-guanosine-3'-phosphate
  modified_base 12: mod_base = OTHER; note = 2'-O-methyl-cytidine-3'-phosphate
  modified_base 13: mod_base = OTHER; note = 2'-O-methyl-cytidine-3'-phosphate
  modified_base 14: mod_base = OTHER; note = 2'-O-methyl-cytidine-3'-phosphate
  modified_base 15: mod_base = OTHER; note = 2'-O-methyl-adenosine-3'-phosphate
  modified_base 16: mod_base = OTHER; note = 2'-O-methyl-uridine-3'-phosphate
  modified_base 17: mod_base = OTHER; note = 2'-O-methyl-cytidine-3'-phosphate
  modified_base 18: mod_base = OTHER; note = 2'-O-methyl-uridine-3'-phosphate
  modified_base 19: mod_base = OTHER; note = 2'-O-methyl-adenosine-3'-phosphate
gaacttgttggcccatcta

SEQ ID NO: 1545 - RNA, 19 nt, synthetic construct
  source 1..19: mol_type = other RNA
  modified_base 1: mod_base = OTHER; note = 2'-O-methyl-adenosine-3'-phosphorothioate
  modified_base 2: mod_base = OTHER; note = 2'-O-methyl-adenosine-3'-phosphorothioate
  modified_base 3: mod_base = OTHER; note = 2'-O-methyl-cytidine-3'-phosphate
  modified_base 4: mod_base = OTHER; note = 2'-O-methyl-uridine-3'-phosphate
  modified_base 5: mod_base = OTHER; note = 2'-deoxy-2'-fluoro-uridine-3'-phosphate
  modified_base 6: mod_base = OTHER; note = 2'-O-methyl-guanosine-3'-phosphate
  modified_base 7: mod_base = OTHER; note = 2'-deoxy-2'-fluoro-uridine-3'-phosphate
  modified_base 8: mod_base = OTHER; note = 2'-deoxy-2'-fluoro-uridine-3'-phosphate
  modified_base 9: mod_base = OTHER; note = 2'-deoxy-2'-fluoro-guanosine-3'-phosphate
  modified_base 10: mod_base = OTHER; note = 2'-O-methyl-guanosine-3'-phosphate
  modified_base 11: mod_base = OTHER; note = 2'-O-methyl-cytidine-3'-phosphate
  modified_base 12: mod_base = OTHER; note = 2'-O-methyl-cytidine-3'-phosphate
  modified_base 13: mod_base = OTHER; note = 2'-O-methyl-cytidine-3'-phosphate
  modified_base 14: mod_base = OTHER; note = 2'-O-methyl-adenosine-3'-phosphate
  modified_base 15: mod_base = OTHER; note = 2'-O-methyl-uridine-3'-phosphate
  modified_base 16: mod_base = OTHER; note = 2'-O-methyl-cytidine-3'-phosphate
  modified_base 17: mod_base = OTHER; note = 2'-O-methyl-uridine-3'-phosphate
  modified_base 18: mod_base = OTHER; note = 2'-O-methyl-adenosine-3'-phosphate
  modified_base 19: mod_base = OTHER; note = 2'-O-methyl-adenosine-3'-phosphate
aacttgttggcccatctaa

SEQ ID NO: 1546 - RNA, 19 nt, synthetic construct
  source 1..19: mol_type = other RNA
  modified_base 1: mod_base = OTHER; note = 2'-O-methyl-cytidine-3'-phosphorothioate
  modified_base 2: mod_base = OTHER; note = 2'-O-methyl-uridine-3'-phosphorothioate
  modified_base 3: mod_base = OTHER; note = 2'-O-methyl-uridine-3'-phosphate
  modified_base 4: mod_base = OTHER; note = 2'-O-methyl-guanosine-3'-phosphate
  modified_base 5: mod_base = OTHER; note = 2'-deoxy-2'-fluoro-uridine-3'-phosphate
  modified_base 6: mod_base = OTHER; note = 2'-O-methyl-uridine-3'-phosphate
  modified_base 7: mod_base = OTHER; note = 2'-deoxy-2'-fluoro-guanosine-3'-phosphate
  modified_base 8: mod_base = OTHER; note = 2'-deoxy-2'-fluoro-guanosine-3'-phosphate
  modified_base 9: mod_base = OTHER; note = 2'-deoxy-2'-fluoro-cytidine-3'-phosphate
  modified_base 10: mod_base = OTHER; note = 2'-O-methyl-cytidine-3'-phosphate
  modified_base 11: mod_base = OTHER; note = 2'-O-methyl-cytidine-3'-phosphate
  modified_base 12: mod_base = OTHER; note = 2'-O-methyl-adenosine-3'-phosphate
  modified_base 13: mod_base = OTHER; note = 2'-O-methyl-uridine-3'-phosphate
  modified_base 14: mod_base = OTHER; note = 2'-O-methyl-cytidine-3'-phosphate
  modified_base 15: mod_base = OTHER; note = 2'-O-methyl-uridine-3'-phosphate
  modified_base 16: mod_base = OTHER; note = 2'-O-methyl-adenosine-3'-phosphate
  modified_base 17: mod_base = OTHER; note = 2'-O-methyl-uridine-3'-phosphate
  modified_base 18: mod_base = OTHER; note = 2'-O-methyl-uridine-3'-phosphate
  modified_base 19: mod_base = OTHER; note = 2'-O-methyl-adenosine-3'-phosphate
cttgttggcccatctatta

SEQ ID NO: 1547 - RNA, 19 nt, synthetic construct
  source 1..19: mol_type = other RNA
  modified_base 1: mod_base = OTHER; note = 2'-O-methyl-uridine-3'-phosphorothioate
  modified_base 2: mod_base = OTHER; note = 2'-O-methyl-guanosine-3'-phosphorothioate
  modified_base 3: mod_base = OTHER; note = 2'-O-methyl-uridine-3'-phosphate
  modified_base 4: mod_base = OTHER; note = 2'-O-methyl-uridine-3'-phosphate
  modified_base 5: mod_base = OTHER; note = 2'-deoxy-2'-fluoro-guanosine-3'-phosphate
  modified_base 6: mod_base = OTHER; note = 2'-O-methyl-guanosine-3'-phosphate
  modified_base 7: mod_base = OTHER; note = 2'-deoxy-2'-fluoro-cytidine-3'-phosphate
  modified_base 8: mod_base = OTHER; note = 2'-deoxy-2'-fluoro-cytidine-3'-phosphate
  modified_base 9: mod_base = OTHER; note = 2'-deoxy-2'-fluoro-cytidine-3'-phosphate
  modified_base 10: mod_base = OTHER; note = 2'-O-methyl-adenosine-3'-phosphate
  modified_base 11: mod_base = OTHER; note = 2'-O-methyl-uridine-3'-phosphate
  modified_base 12: mod_base = OTHER; note = 2'-O-methyl-cytidine-3'-phosphate
  modified_base 13: mod_base = OTHER; note = 2'-O-methyl-uridine-3'-phosphate
  modified_base 14: mod_base = OTHER; note = 2'-O-methyl-adenosine-3'-phosphate
  modified_base 15: mod_base = OTHER; note = 2'-O-methyl-uridine-3'-phosphate
  modified_base 16: mod_base = OTHER; note = 2'-O-methyl-uridine-3'-phosphate
  modified_base 17: mod_base = OTHER; note = 2'-O-methyl-adenosine-3'-phosphate
  modified_base 18: mod_base = OTHER; note = 2'-O-methyl-cytidine-3'-phosphate
  modified_base 19: mod_base = OTHER; note = 2'-O-methyl-adenosine-3'-phosphate
tgttggcccatctattaca

SEQ ID NO: 1548 - RNA, 19 nt, synthetic construct
  source 1..19: mol_type = other RNA
  modified_base 1: mod_base = OTHER; note = 2'-O-methyl-adenosine-3'-phosphorothioate
  modified_base 2: mod_base = OTHER; note = 2'-O-methyl-uridine-3'-phosphorothioate
  modified_base 3: mod_base = OTHER; note = 2'-O-methyl-adenosine-3'-phosphate
  modified_base 4: mod_base = OTHER; note = 2'-O-methyl-guanosine-3'-phosphate
  modified_base 5: mod_base = OTHER; note = 2'-deoxy-2'-fluoro-adenosine-3'-phosphate
  modified_base 6: mod_base = OTHER; note = 2'-O-methyl-uridine-3'-phosphate
  modified_base 7: mod_base = OTHER; note = 2'-deoxy-2'-fluoro-cytidine-3'-phosphate
  modified_base 8: mod_base = OTHER; note = 2'-deoxy-2'-fluoro-cytidine-3'-phosphate
  modified_base 9: mod_base = OTHER; note = 2'-deoxy-2'-fluoro-adenosine-3'-phosphate
  modified_base 10: mod_base = OTHER; note = 2'-O-methyl-guanosine-3'-phosphate
  modified_base 11: mod_base = OTHER; note = 2'-O-methyl-cytidine-3'-phosphate
  modified_base 12: mod_base = OTHER; note = 2'-O-methyl-uridine-3'-phosphate
  modified_base 13: mod_base = OTHER; note = 2'-O-methyl-adenosine-3'-phosphate
  modified_base 14: mod_base = OTHER; note = 2'-O-methyl-uridine-3'-phosphate
  modified_base 15: mod_base = OTHER; note = 2'-O-methyl-guanosine-3'-phosphate
  modified_base 16: mod_base = OTHER; note = 2'-O-methyl-cytidine-3'-phosphate
  modified_base 17: mod_base = OTHER; note = 2'-O-methyl-uridine-3'-phosphate
  modified_base 18: mod_base = OTHER; note = 2'-O-methyl-adenosine-3'-phosphate
  modified_base 19: mod_base = OTHER; note = 2'-O-methyl-adenosine-3'-phosphate
atagatccagctatgctaa

SEQ ID NO: 1549 - RNA, 19 nt, synthetic construct
  source 1..19: mol_type = other RNA
  modified_base 1: mod_base = OTHER; note = 2'-O-methyl-uridine-3'-phosphorothioate
  modified_base 2: mod_base = OTHER; note = 2'-O-methyl-adenosine-3'-phosphorothioate
  modified_base 3: mod_base = OTHER; note = 2'-O-methyl-guanosine-3'-phosphate
  modified_base 4: mod_base = OTHER; note = 2'-O-methyl-adenosine-3'-phosphate
  modified_base 5: mod_base = OTHER; note = 2'-deoxy-2'-fluoro-uridine-3'-phosphate
  modified_base 6: mod_base = OTHER; note = 2'-O-methyl-cytidine-3'-phosphate
  modified_base 7: mod_base = OTHER; note = 2'-deoxy-2'-fluoro-cytidine-3'-phosphate
  modified_base 8: mod_base = OTHER; note = 2'-deoxy-2'-fluoro-adenosine-3'-phosphate
  modified_base 9: mod_base = OTHER; note = 2'-deoxy-2'-fluoro-guanosine-3'-phosphate
  modified_base 10: mod_base = OTHER; note = 2'-O-methyl-cytidine-3'-phosphate
  modified_base 11: mod_base = OTHER; note = 2'-O-methyl-uridine-3'-phosphate
  modified_base 12: mod_base = OTHER; note = 2'-O-methyl-adenosine-3'-phosphate
  modified_base 13: mod_base = OTHER; note = 2'-O-methyl-uridine-3'-phosphate
  modified_base 14: mod_base = OTHER; note = 2'-O-methyl-guanosine-3'-phosphate
  modified_base 15: mod_base = OTHER; note = 2'-O-methyl-cytidine-3'-phosphate
  modified_base 16: mod_base = OTHER; note = 2'-O-methyl-uridine-3'-phosphate
  modified_base 17: mod_base = OTHER; note = 2'-O-methyl-adenosine-3'-phosphate
  modified_base 18: mod_base = OTHER; note = 2'-O-methyl-uridine-3'-phosphate
  modified_base 19: mod_base = OTHER; note = 2'-O-methyl-adenosine-3'-phosphate
tagatccagctatgctata

SEQ ID NO: 1550 - RNA, 19 nt, synthetic construct
  source 1..19: mol_type = other RNA
  modified_base 1: mod_base = OTHER; note = 2'-O-methyl-adenosine-3'-phosphorothioate
  modified_base 2: mod_base = OTHER; note = 2'-O-methyl-guanosine-3'-phosphorothioate
  modified_base 3: mod_base = OTHER; note = 2'-O-methyl-adenosine-3'-phosphate
  modified_base 4: mod_base = OTHER; note = 2'-O-methyl-uridine-3'-phosphate
  modified_base 5: mod_base = OTHER; note = 2'-deoxy-2'-fluoro-cytidine-3'-phosphate
  modified_base 6: mod_base = OTHER; note = 2'-O-methyl-cytidine-3'-phosphate
  modified_base 7: mod_base = OTHER; note = 2'-deoxy-2'-fluoro-adenosine-3'-phosphate
  modified_base 8: mod_base = OTHER; note = 2'-deoxy-2'-fluoro-guanosine-3'-phosphate
  modified_base 9: mod_base = OTHER; note = 2'-deoxy-2'-fluoro-cytidine-3'-phosphate
  modified_base 10: mod_base = OTHER; note = 2'-O-methyl-uridine-3'-phosphate
  modified_base 11: mod_base = OTHER; note = 2'-O-methyl-adenosine-3'-phosphate
  modified_base 12: mod_base = OTHER; note = 2'-O-methyl-uridine-3'-phosphate
  modified_base 13: mod_base = OTHER; note = 2'-O-methyl-guanosine-3'-phosphate
  modified_base 14: mod_base = OTHER; note = 2'-O-methyl-cytidine-3'-phosphate
  modified_base 15: mod_base = OTHER; note = 2'-O-methyl-uridine-3'-phosphate
  modified_base 16: mod_base = OTHER; note = 2'-O-methyl-adenosine-3'-phosphate
  modified_base 17: mod_base = OTHER; note = 2'-O-methyl-uridine-3'-phosphate
  modified_base 18: mod_base = OTHER; note = 2'-O-methyl-uridine-3'-phosphate
  modified_base 19: mod_base = OTHER; note = 2'-O-methyl-adenosine-3'-phosphate
agatccagctatgctatta

SEQ ID NO: 1551 - RNA, 19 nt, synthetic construct
  source 1..19: mol_type = other RNA
  modified_base 1: mod_base = OTHER; note = 2'-O-methyl-uridine-3'-phosphorothioate
  modified_base 2: mod_base = OTHER; note = 2'-O-methyl-cytidine-3'-phosphorothioate
  modified_base 3: mod_base = OTHER; note = 2'-O-methyl-adenosine-3'-phosphate
  modified_base 4: mod_base = OTHER; note = 2'-O-methyl-guanosine-3'-phosphate
  modified_base 5: mod_base = OTHER; note = 2'-deoxy-2'-fluoro-adenosine-3'-phosphate
  modified_base 6: mod_base = OTHER; note = 2'-O-methyl-adenosine-3'-phosphate
  modified_base 7: mod_base = OTHER; note = 2'-deoxy-2'-fluoro-cytidine-3'-phosphate
  modified_base 8: mod_base = OTHER; note = 2'-deoxy-2'-fluoro-adenosine-3'-phosphate
  modified_base 9: mod_base = OTHER; note = 2'-deoxy-2'-fluoro-uridine-3'-phosphate
  modified_base 10: mod_base = OTHER; note = 2'-O-methyl-cytidine-3'-phosphate
  modified_base 11: mod_base = OTHER; note = 2'-O-methyl-uridine-3'-phosphate
  modified_base 12: mod_base = OTHER; note = 2'-O-methyl-uridine-3'-phosphate
  modified_base 13: mod_base = OTHER; note = 2'-O-methyl-cytidine-3'-phosphate
  modified_base 14: mod_base = OTHER; note = 2'-O-methyl-cytidine-3'-phosphate
  modified_base 15: mod_base = OTHER; note = 2'-O-methyl-adenosine-3'-phosphate
  modified_base 16: mod_base = OTHER; note = 2'-O-methyl-adenosine-3'-phosphate
  modified_base 17: mod_base = OTHER; note = 2'-O-methyl-uridine-3'-phosphate
  modified_base 18: mod_base = OTHER; note = 2'-O-methyl-adenosine-3'-phosphate
  modified_base 19: mod_base = OTHER; note = 2'-O-methyl-adenosine-3'-phosphate
tcagaacatcttccaataa

SEQ ID NO: 1552 - RNA, 19 nt, synthetic construct
  source 1..19: mol_type = other RNA
  modified_base 1: mod_base = OTHER; note = 2'-O-methyl-adenosine-3'-phosphorothioate
  modified_base 2: mod_base = OTHER; note = 2'-O-methyl-cytidine-3'-phosphorothioate
  modified_base 3: mod_base = OTHER; note = 2'-O-methyl-adenosine-3'-phosphate
  modified_base 4: mod_base = OTHER; note = 2'-O-methyl-uridine-3'-phosphate
  modified_base 5: mod_base = OTHER; note = 2'-deoxy-2'-fluoro-cytidine-3'-phosphate
  modified_base 6: mod_base = OTHER; note = 2'-O-methyl-uridine-3'-phosphate
  modified_base 7: mod_base = OTHER; note = 2'-deoxy-2'-fluoro-uridine-3'-phosphate
  modified_base 8: mod_base = OTHER; note = 2'-deoxy-2'-fluoro-cytidine-3'-phosphate
  modified_base 9: mod_base = OTHER; note = 2'-deoxy-2'-fluoro-cytidine-3'-phosphate
  modified_base 10: mod_base = OTHER; note = 2'-O-methyl-adenosine-3'-phosphate
  modified_base 11: mod_base = OTHER; note = 2'-O-methyl-adenosine-3'-phosphate
  modified_base 12: mod_base = OTHER; note = 2'-O-methyl-uridine-3'-phosphate
  modified_base 13: mod_base = OTHER; note = 2'-O-methyl-adenosine-3'-phosphate
  modified_base 14: mod_base = OTHER; note = 2'-O-methyl-adenosine-3'-phosphate
  modified_base 15: mod_base = OTHER; note = 2'-O-methyl-cytidine-3'-phosphate
  modified_base 16: mod_base = OTHER; note = 2'-O-methyl-uridine-3'-phosphate
  modified_base 17: mod_base = OTHER; note = 2'-O-methyl-cytidine-3'-phosphate
  modified_base 18: mod_base = OTHER; note = 2'-O-methyl-adenosine-3'-phosphate
  modified_base 19: mod_base = OTHER; note = 2'-O-methyl-adenosine-3'-phosphate
acatcttccaataactcaa

SEQ ID NO: 1553 - RNA, 19 nt, synthetic construct
  source 1..19: mol_type = other RNA
  modified_base 1: mod_base = OTHER; note = 2'-O-methyl-uridine-3'-phosphorothioate
  modified_base 2: mod_base = OTHER; note = 2'-O-methyl-cytidine-3'-phosphorothioate
  modified_base 3: mod_base = OTHER; note = 2'-O-methyl-adenosine-3'-phosphate
  modified_base 4: mod_base = OTHER; note = 2'-O-methyl-cytidine-3'-phosphate
  modified_base 5: mod_base = OTHER; note = 2'-deoxy-2'-fluoro-cytidine-3'-phosphate
  modified_base 6: mod_base = OTHER; note = 2'-O-methyl-adenosine-3'-phosphate
  modified_base 7: mod_base = OTHER; note = 2'-deoxy-2'-fluoro-adenosine-3'-phosphate
  modified_base 8: mod_base = OTHER; note = 2'-deoxy-2'-fluoro-adenosine-3'-phosphate
  modified_base 9: mod_base = OTHER; note = 2'-deoxy-2'-fluoro-cytidine-3'-phosphate
  modified_base 10: mod_base = OTHER; note = 2'-O-methyl-uridine-3'-phosphate
  modified_base 11: mod_base = OTHER; note = 2'-O-methyl-uridine-3'-phosphate
  modified_base 12: mod_base = OTHER; note = 2'-O-methyl-uridine-3'-phosphate
  modified_base 13: mod_base = OTHER; note = 2'-O-methyl-guanosine-3'-phosphate
  modified_base 14: mod_base = OTHER; note = 2'-O-methyl-guanosine-3'-phosphate
  modified_base 15: mod_base = OTHER; note = 2'-O-methyl-uridine-3'-phosphate
  modified_base 16: mod_base = OTHER; note = 2'-O-methyl-adenosine-3'-phosphate
  modified_base 17: mod_base = OTHER; note = 2'-O-methyl-adenosine-3'-phosphate
  modified_base 18: mod_base = OTHER; note = 2'-O-methyl-uridine-3'-phosphate
  modified_base 19: mod_base = OTHER; note = 2'-O-methyl-adenosine-3'-phosphate
tcaccaaactttggtaata

SEQ ID NO: 1554 - RNA, 19 nt, synthetic construct
  source 1..19: mol_type = other RNA
  modified_base 1: mod_base = OTHER; note = 2'-O-methyl-cytidine-3'-phosphorothioate
  modified_base 2: mod_base = OTHER; note = 2'-O-methyl-adenosine-3'-phosphorothioate
  modified_base 3: mod_base = OTHER; note = 2'-O-methyl-cytidine-3'-phosphate
  modified_base 4: mod_base = OTHER; note = 2'-O-methyl-cytidine-3'-phosphate
  modified_base 5: mod_base = OTHER; note = 2'-deoxy-2'-fluoro-adenosine-3'-phosphate
  modified_base 6: mod_base = OTHER; note = 2'-O-methyl-adenosine-3'-phosphate
  modified_base 7: mod_base = OTHER; note = 2'-deoxy-2'-fluoro-adenosine-3'-phosphate
  modified_base 8: mod_base = OTHER; note = 2'-deoxy-2'-fluoro-cytidine-3'-phosphate
  modified_base 9: mod_base = OTHER; note = 2'-deoxy-2'-fluoro-uridine-3'-phosphate
  modified_base 10: mod_base = OTHER; note = 2'-O-methyl-uridine-3'-phosphate
  modified_base 11: mod_base = OTHER; note = 2'-O-methyl-uridine-3'-phosphate
  modified_base 12: mod_base = OTHER; note = 2'-O-methyl-guanosine-3'-phosphate
  modified_base 13: mod_base = OTHER; note = 2'-O-methyl-guanosine-3'-phosphate
  modified_base 14: mod_base = OTHER; note = 2'-O-methyl-uridine-3'-phosphate
  modified_base 15: mod_base = OTHER; note = 2'-O-methyl-adenosine-3'-phosphate
  modified_base 16: mod_base = OTHER; note = 2'-O-methyl-adenosine-3'-phosphate
  modified_base 17: mod_base = OTHER; note = 2'-O-methyl-uridine-3'-phosphate
  modified_base 18: mod_base = OTHER; note = 2'-O-methyl-uridine-3'-phosphate
  modified_base 19: mod_base = OTHER; note = 2'-O-methyl-adenosine-3'-phosphate
caccaaactttggtaatta

SEQ ID NO: 1555 - RNA, 19 nt, synthetic construct
  source 1..19: mol_type = other RNA
  modified_base 1: mod_base = OTHER; note = 2'-O-methyl-adenosine-3'-phosphorothioate
  modified_base 2: mod_base = OTHER; note = 2'-O-methyl-cytidine-3'-phosphorothioate
  modified_base 3: mod_base = OTHER; note = 2'-O-methyl-uridine-3'-phosphate
  modified_base 4: mod_base = OTHER; note = 2'-O-methyl-uridine-3'-phosphate
  modified_base 5: mod_base = OTHER; note = 2'-deoxy-2'-fluoro-uridine-3'-phosphate
  modified_base 6: mod_base = OTHER; note = 2'-O-methyl-guanosine-3'-phosphate
  modified_base 7: mod_base = OTHER; note = 2'-deoxy-2'-fluoro-guanosine-3'-phosphate
  modified_base 8: mod_base = OTHER; note = 2'-deoxy-2'-fluoro-uridine-3'-phosphate
  modified_base 9: mod_base = OTHER; note = 2'-deoxy-2'-fluoro-adenosine-3'-phosphate
  modified_base 10: mod_base = OTHER; note = 2'-O-methyl-adenosine-3'-phosphate
  modified_base 11: mod_base = OTHER; note = 2'-O-methyl-uridine-3'-phosphate
  modified_base 12: mod_base = OTHER; note = 2'-O-methyl-uridine-3'-phosphate
  modified_base 13: mod_base = OTHER; note = 2'-O-methyl-uridine-3'-phosphate
  modified_base 14: mod_base = OTHER; note = 2'-O-methyl-adenosine-3'-phosphate
  modified_base 15: mod_base = OTHER; note = 2'-O-methyl-adenosine-3'-phosphate
  modified_base 16: mod_base = OTHER; note = 2'-O-methyl-guanosine-3'-phosphate
  modified_base 17: mod_base = OTHER; note = 2'-O-methyl-uridine-3'-phosphate
  modified_base 18: mod_base = OTHER; note = 2'-O-methyl-uridine-3'-phosphate
  modified_base 19: mod_base = OTHER; note = 2'-O-methyl-adenosine-3'-phosphate
actttggtaatttaagtta

SEQ ID NO: 1556 - RNA, 19 nt, synthetic construct
  source 1..19: mol_type = other RNA
  modified_base 1: mod_base = OTHER; note = 2'-O-methyl-guanosine-3'-phosphorothioate
  modified_base 2: mod_base = OTHER; note = 2'-O-methyl-guanosine-3'-phosphorothioate
  modified_base 3: mod_base = OTHER; note = 2'-O-methyl-uridine-3'-phosphate
  modified_base 4: mod_base = OTHER; note = 2'-O-methyl-adenosine-3'-phosphate
  modified_base 5: mod_base = OTHER; note = 2'-deoxy-2'-fluoro-adenosine-3'-phosphate
  modified_base 6: mod_base = OTHER; note = 2'-O-methyl-uridine-3'-phosphate
  modified_base 7: mod_base = OTHER; note = 2'-deoxy-2'-fluoro-uridine-3'-phosphate
  modified_base 8: mod_base = OTHER; note = 2'-deoxy-2'-fluoro-uridine-3'-phosphate
  modified_base 9: mod_base = OTHER; note = 2'-deoxy-2'-fluoro-adenosine-3'-phosphate
  modified_base 10: mod_base = OTHER; note = 2'-O-methyl-adenosine-3'-phosphate
  modified_base 11: mod_base = OTHER; note = 2'-O-methyl-guanosine-3'-phosphate
  modified_base 12: mod_base = OTHER; note = 2'-O-methyl-uridine-3'-phosphate
  modified_base 13: mod_base = OTHER; note = 2'-O-methyl-uridine-3'-phosphate
  modified_base 14: mod_base = OTHER; note = 2'-O-methyl-guanosine-3'-phosphate
  modified_base 15: mod_base = OTHER; note = 2'-O-methyl-adenosine-3'-phosphate
  modified_base 16: mod_base = OTHER; note = 2'-O-methyl-cytidine-3'-phosphate
  modified_base 17: mod_base = OTHER; note = 2'-O-methyl-uridine-3'-phosphate
  modified_base 18: mod_base = OTHER; note = 2'-O-methyl-adenosine-3'-phosphate
  modified_base 19: mod_base = OTHER; note = 2'-O-methyl-adenosine-3'-phosphate
ggtaatttaagttgactaa

SEQ ID NO: 1557 - RNA, 19 nt, synthetic construct
  source 1..19: mol_type = other RNA
  modified_base 1: mod_base = OTHER; note = 2'-O-methyl-adenosine-3'-phosphorothioate
  modified_base 2: mod_base = OTHER; note = 2'-O-methyl-cytidine-3'-phosphorothioate
  modified_base 3: mod_base = OTHER; note = 2'-O-methyl-adenosine-3'-phosphate
  modified_base 4: mod_base = OTHER; note = 2'-O-methyl-cytidine-3'-phosphate
  modified_base 5: mod_base = OTHER; note = 2'-deoxy-2'-fluoro-cytidine-3'-phosphate
  modified_base 6: mod_base = OTHER; note = 2'-O-methyl-uridine-3'-phosphate
  modified_base 7: mod_base = OTHER; note = 2'-deoxy-2'-fluoro-adenosine-3'-phosphate
  modified_base 8: mod_base = OTHER; note = 2'-deoxy-2'-fluoro-uridine-3'-phosphate
  modified_base 9: mod_base = OTHER; note = 2'-deoxy-2'-fluoro-adenosine-3'-phosphate
  modified_base 10: mod_base = OTHER; note = 2'-O-methyl-cytidine-3'-phosphate
  modified_base 11: mod_base = OTHER; note = 2'-O-methyl-uridine-3'-phosphate
  modified_base 12: mod_base = OTHER; note = 2'-O-methyl-guanosine-3'-phosphate
  modified_base 13: mod_base = OTHER; note = 2'-O-methyl-cytidine-3'-phosphate
  modified_base 14: mod_base = OTHER; note = 2'-O-methyl-adenosine-3'-phosphate
  modified_base 15: mod_base = OTHER; note = 2'-O-methyl-uridine-3'-phosphate
  modified_base 16: mod_base = OTHER; note = 2'-O-methyl-adenosine-3'-phosphate
  modified_base 17: mod_base = OTHER; note = 2'-O-methyl-adenosine-3'-phosphate
  modified_base 18: mod_base = OTHER; note = 2'-O-methyl-uridine-3'-phosphate
  modified_base 19: mod_base = OTHER; note = 2'-O-methyl-adenosine-3'-phosphate
acacctatactgcataata

SEQ ID NO: 1558 - RNA, 19 nt, synthetic construct
  source 1..19: mol_type = other RNA
  modified_base 1: mod_base = OTHER; note = 2'-O-methyl-cytidine-3'-phosphorothioate
  modified_base 2: mod_base = OTHER; note = 2'-O-methyl-adenosine-3'-phosphorothioate
  modified_base 3: mod_base = OTHER; note = 2'-O-methyl-cytidine-3'-phosphate
  modified_base 4: mod_base = OTHER; note = 2'-O-methyl-cytidine-3'-phosphate
  modified_base 5: mod_base = OTHER; note = 2'-deoxy-2'-fluoro-uridine-3'-phosphate
  modified_base 6: mod_base = OTHER; note = 2'-O-methyl-adenosine-3'-phosphate
  modified_base 7: mod_base = OTHER; note = 2'-deoxy-2'-fluoro-uridine-3'-phosphate
  modified_base 8: mod_base = OTHER; note = 2'-deoxy-2'-fluoro-adenosine-3'-phosphate
  modified_base 9: mod_base = OTHER; note = 2'-deoxy-2'-fluoro-cytidine-3'-phosphate
  modified_base 10: mod_base = OTHER; note = 2'-O-methyl-uridine-3'-phosphate
  modified_base 11: mod_base = OTHER; note = 2'-O-methyl-guanosine-3'-phosphate
  modified_base 12: mod_base = OTHER; note = 2'-O-methyl-cytidine-3'-phosphate
  modified_base 13: mod_base = OTHER; note = 2'-O-methyl-adenosine-3'-phosphate
  modified_base 14: mod_base = OTHER; note = 2'-O-methyl-uridine-3'-phosphate
  modified_base 15: mod_base = OTHER; note = 2'-O-methyl-adenosine-3'-phosphate
  modified_base 16: mod_base = OTHER; note = 2'-O-methyl-adenosine-3'-phosphate
  modified_base 17: mod_base = OTHER; note = 2'-O-methyl-uridine-3'-phosphate
  modified_base 18: mod_base = OTHER; note = 2'-O-methyl-cytidine-3'-phosphate
  modified_base 19: mod_base = OTHER; note = 2'-O-methyl-adenosine-3'-phosphate
cacctatactgcataatca

SEQ ID NO: 1559 - RNA, 19 nt, synthetic construct
  source 1..19: mol_type = other RNA
  modified_base 1: mod_base = OTHER; note = 2'-O-methyl-adenosine-3'-phosphorothioate
  modified_base 2: mod_base = OTHER; note = 2'-O-methyl-cytidine-3'-phosphorothioate
  modified_base 3: mod_base = OTHER; note = 2'-O-methyl-cytidine-3'-phosphate
  modified_base 4: mod_base = OTHER; note = 2'-O-methyl-uridine-3'-phosphate
  modified_base 5: mod_base = OTHER; note = 2'-deoxy-2'-fluoro-adenosine-3'-phosphate
  modified_base 6: mod_base = OTHER; note = 2'-O-methyl-uridine-3'-phosphate
  modified_base 7: mod_base = OTHER; note = 2'-deoxy-2'-fluoro-adenosine-3'-phosphate
  modified_base 8: mod_base = OTHER; note = 2'-deoxy-2'-fluoro-cytidine-3'-phosphate
  modified_base 9: mod_base = OTHER; note = 2'-deoxy-2'-fluoro-uridine-3'-phosphate
  modified_base 10: mod_base = OTHER; note = 2'-O-methyl-guanosine-3'-phosphate
  modified_base 11: mod_base = OTHER; note = 2'-O-methyl-cytidine-3'-phosphate
  modified_base 12: mod_base = OTHER; note = 2'-O-methyl-adenosine-3'-phosphate
  modified_base 13: mod_base = OTHER; note = 2'-O-methyl-uridine-3'-phosphate
  modified_base 14: mod_base = OTHER; note = 2'-O-methyl-adenosine-3'-phosphate
  modified_base 15: mod_base = OTHER; note = 2'-O-methyl-adenosine-3'-phosphate
  modified_base 16: mod_base = OTHER; note = 2'-O-methyl-uridine-3'-phosphate
  modified_base 17: mod_base = OTHER; note = 2'-O-methyl-cytidine-3'-phosphate
  modified_base 18: mod_base = OTHER; note = 2'-O-methyl-cytidine-3'-phosphate
  modified_base 19: mod_base = OTHER; note = 2'-O-methyl-adenosine-3'-phosphate
acctatactgcataatcca

SEQ ID NO: 1560 - RNA, 19 nt, synthetic construct
  source 1..19: mol_type = other RNA
  modified_base 1: mod_base = OTHER; note = 2'-O-methyl-cytidine-3'-phosphorothioate
  modified_base 2: mod_base = OTHER; note = 2'-O-methyl-cytidine-3'-phosphorothioate
  modified_base 3: mod_base = OTHER; note = 2'-O-methyl-uridine-3'-phosphate
  modified_base 4: mod_base = OTHER; note = 2'-O-methyl-adenosine-3'-phosphate
  modified_base 5: mod_base = OTHER; note = 2'-deoxy-2'-fluoro-uridine-3'-phosphate
  modified_base 6: mod_base = OTHER; note = 2'-O-methyl-adenosine-3'-phosphate
  modified_base 7: mod_base = OTHER; note = 2'-deoxy-2'-fluoro-cytidine-3'-phosphate
  modified_base 8: mod_base = OTHER; note = 2'-deoxy-2'-fluoro-uridine-3'-phosphate
  modified_base 9: mod_base = OTHER; note = 2'-deoxy-2'-fluoro-guanosine-3'-phosphate
  modified_base 10: mod_base = OTHER; note = 2'-O-methyl-cytidine-3'-phosphate
  modified_base 11: mod_base = OTHER; note = 2'-O-methyl-adenosine-3'-phosphate
  modified_base 12: mod_base = OTHER; note = 2'-O-methyl-uridine-3'-phosphate
  modified_base 13: mod_base = OTHER; note = 2'-O-methyl-adenosine-3'-phosphate
  modified_base 14: mod_base = OTHER; note = 2'-O-methyl-adenosine-3'-phosphate
  modified_base 15: mod_base = OTHER; note = 2'-O-methyl-uridine-3'-phosphate
  modified_base 16: mod_base = OTHER; note = 2'-O-methyl-cytidine-3'-phosphate
  modified_base 17: mod_base = OTHER; note = 2'-O-methyl-cytidine-3'-phosphate
  modified_base 18: mod_base = OTHER; note = 2'-O-methyl-adenosine-3'-phosphate
  modified_base 19: mod_base = OTHER; note = 2'-O-methyl-adenosine-3'-phosphate
cctatactgcataatccaa

SEQ ID NO: 1561 - RNA, 19 nt, synthetic construct
  source 1..19: mol_type = other RNA
  modified_base 1: mod_base = OTHER; note = 2'-O-methyl-uridine-3'-phosphorothioate
  modified_base 2: mod_base = OTHER; note = 2'-O-methyl-adenosine-3'-phosphorothioate
  modified_base 3: mod_base = OTHER; note = 2'-O-methyl-uridine-3'-phosphate
  modified_base 4: mod_base = OTHER; note = 2'-O-methyl-adenosine-3'-phosphate
  modified_base 5: mod_base = OTHER; note = 2'-deoxy-2'-fluoro-cytidine-3'-phosphate
  modified_base 6: mod_base = OTHER; note = 2'-O-methyl-uridine-3'-phosphate
  modified_base 7: mod_base = OTHER; note = 2'-deoxy-2'-fluoro-guanosine-3'-phosphate
  modified_base 8: mod_base = OTHER; note = 2'-deoxy-2'-fluoro-cytidine-3'-phosphate
  modified_base 9: mod_base = OTHER; note = 2'-deoxy-2'-fluoro-adenosine-3'-phosphate
  modified_base 10: mod_base = OTHER; note = 2'-O-methyl-uridine-3'-phosphate
  modified_base 11: mod_base = OTHER; note = 2'-O-methyl-adenosine-3'-phosphate
  modified_base 12: mod_base = OTHER; note = 2'-O-methyl-adenosine-3'-phosphate
  modified_base 13: mod_base = OTHER; note = 2'-O-methyl-uridine-3'-phosphate
  modified_base 14: mod_base = OTHER; note = 2'-O-methyl-cytidine-3'-phosphate
  modified_base 15: mod_base = OTHER; note = 2'-O-methyl-cytidine-3'-phosphate
  modified_base 16: mod_base = OTHER; note = 2'-O-methyl-adenosine-3'-phosphate
  modified_base 17: mod_base = OTHER; note = 2'-O-methyl-adenosine-3'-phosphate
  modified_base 18: mod_base = OTHER; note = 2'-O-methyl-cytidine-3'-phosphate
  modified_base 19: mod_base = OTHER; note = 2'-O-methyl-adenosine-3'-phosphate
tatactgcataatccaaca

SEQ ID NO: 1562 - RNA, 19 nt, synthetic construct
  source 1..19: mol_type = other RNA
  modified_base 1: mod_base = OTHER; note = 2'-O-methyl-adenosine-3'-phosphorothioate
  modified_base 2: mod_base = OTHER; note = 2'-O-methyl-uridine-3'-phosphorothioate
  modified_base 3: mod_base = OTHER; note = 2'-O-methyl-adenosine-3'-phosphate
  modified_base 4: mod_base = OTHER; note = 2'-O-methyl-cytidine-3'-phosphate
  modified_base 5: mod_base = OTHER; note = 2'-deoxy-2'-fluoro-uridine-3'-phosphate
  modified_base 6: mod_base = OTHER; note = 2'-O-methyl-guanosine-3'-phosphate
  modified_base 7: mod_base = OTHER; note = 2'-deoxy-2'-fluoro-cytidine-3'-phosphate
  modified_base 8: mod_base = OTHER; note = 2'-deoxy-2'-fluoro-adenosine-3'-phosphate
  modified_base 9: mod_base = OTHER; note = 2'-deoxy-2'-fluoro-uridine-3'-phosphate
  modified_base 10: mod_base = OTHER; note = 2'-O-methyl-adenosine-3'-phosphate
  modified_base 11: mod_base = OTHER; note = 2'-O-methyl-adenosine-3'-phosphate
  modified_base 12: mod_base = OTHER; note = 2'-O-methyl-uridine-3'-phosphate
  modified_base 13: mod_base = OTHER; note = 2'-O-methyl-cytidine-3'-phosphate
  modified_base 14: mod_base = OTHER; note = 2'-O-methyl-cytidine-3'-phosphate
  modified_base 15: mod_base = OTHER; note = 2'-O-methyl-adenosine-3'-phosphate
  modified_base 16: mod_base = OTHER; note = 2'-O-methyl-adenosine-3'-phosphate
  modified_base 17: mod_base = OTHER; note = 2'-O-methyl-cytidine-3'-phosphate
  modified_base 18: mod_base = OTHER; note = 2'-O-methyl-adenosine-3'-phosphate
  modified_base 19: mod_base = OTHER; note = 2'-O-methyl-adenosine-3'-phosphate
atactgcataatccaacaa

SEQ ID NO: 1563 - RNA, 19 nt, synthetic construct
  source 1..19: mol_type = other RNA
  modified_base 1: mod_base = OTHER; note = 2'-O-methyl-uridine-3'-phosphorothioate
  modified_base 2: mod_base = OTHER; note = 2'-O-methyl-adenosine-3'-phosphorothioate
  modified_base 3: mod_base = OTHER; note = 2'-O-methyl-cytidine-3'-phosphate
  modified_base 4: mod_base = OTHER; note = 2'-O-methyl-uridine-3'-phosphate
  modified_base 5: mod_base = OTHER; note = 2'-deoxy-2'-fluoro-guanosine-3'-phosphate
  modified_base 6: mod_base = OTHER; note = 2'-O-methyl-cytidine-3'-phosphate
  modified_base 7: mod_base = OTHER; note = 2'-deoxy-2'-fluoro-adenosine-3'-phosphate
  modified_base 8: mod_base = OTHER; note = 2'-deoxy-2'-fluoro-uridine-3'-phosphate
  modified_base 9: mod_base = OTHER; note = 2'-deoxy-2'-fluoro-adenosine-3'-phosphate
  modified_base 10: mod_base = OTHER; note = 2'-O-methyl-adenosine-3'-phosphate
  modified_base 11: mod_base = OTHER; note = 2'-O-methyl-uridine-3'-phosphate
  modified_base 12: mod_base = OTHER; note = 2'-O-methyl-cytidine-3'-phosphate
  modified_base 13: mod_base = OTHER; note = 2'-O-methyl-cytidine-3'-phosphate
  modified_base 14: mod_base = OTHER; note = 2'-O-methyl-adenosine-3'-phosphate
  modified_base 15: mod_base = OTHER; note = 2'-O-methyl-adenosine-3'-phosphate
  modified_base 16: mod_base = OTHER; note = 2'-O-methyl-cytidine-3'-phosphate
  modified_base 17: mod_base = OTHER; note = 2'-O-methyl-adenosine-3'-phosphate
  modified_base 18: mod_base = OTHER; note = 2'-O-methyl-adenosine-3'-phosphate
  modified_base 19: mod_base = OTHER; note = 2'-O-methyl-adenosine-3'-phosphate
tactgcataatccaacaaa

SEQ ID NO: 1564 - RNA, 19 nt, synthetic construct
  source 1..19: mol_type = other RNA
  modified_base 1: mod_base = OTHER; note = 2'-O-methyl-adenosine-3'-phosphorothioate
  modified_base 2: mod_base = OTHER; note = 2'-O-methyl-cytidine-3'-phosphorothioate
  modified_base 3: mod_base = OTHER; note = 2'-O-methyl-uridine-3'-phosphate
  modified_base 4: mod_base = OTHER; note = 2'-O-methyl-guanosine-3'-phosphate
  modified_base 5: mod_base = OTHER; note = 2'-deoxy-2'-fluoro-cytidine-3'-phosphate
  modified_base 6: mod_base = OTHER; note = 2'-O-methyl-adenosine-3'-phosphate
  modified_base 7: mod_base = OTHER; note = 2'-deoxy-2'-fluoro-uridine-3'-phosphate
  modified_base 8: mod_base = OTHER; note = 2'-deoxy-2'-fluoro-adenosine-3'-phosphate
  modified_base 9: mod_base = OTHER; note = 2'-deoxy-2'-fluoro-adenosine-3'-phosphate
  modified_base 10: mod_base = OTHER; note = 2'-O-methyl-uridine-3'-phosphate
  modified_base 11: mod_base = OTHER; note = 2'-O-methyl-cytidine-3'-phosphate
  modified_base 12: mod_base = OTHER; note = 2'-O-methyl-cytidine-3'-phosphate
  modified_base 13: mod_base = OTHER; note = 2'-O-methyl-adenosine-3'-phosphate
  modified_base 14: mod_base = OTHER; note = 2'-O-methyl-adenosine-3'-phosphate
  modified_base 15: mod_base = OTHER; note = 2'-O-methyl-cytidine-3'-phosphate
  modified_base 16: mod_base = OTHER; note = 2'-O-methyl-adenosine-3'-phosphate
  modified_base 17: mod_base = OTHER; note = 2'-O-methyl-adenosine-3'-phosphate
  modified_base 18: mod_base = OTHER; note = 2'-O-methyl-uridine-3'-phosphate
  modified_base 19: mod_base = OTHER; note = 2'-O-methyl-adenosine-3'-phosphate
actgcataatccaacaata

SEQ ID NO: 1565 - RNA, 19 nt, synthetic construct
  source 1..19: mol_type = other RNA
  modified_base 1: mod_base = OTHER; note = 2'-O-methyl-uridine-3'-phosphorothioate
  modified_base 2: mod_base = OTHER; note = 2'-O-methyl-uridine-3'-phosphorothioate
  modified_base 3: mod_base = OTHER; note = 2'-O-methyl-guanosine-3'-phosphate
  modified_base 4: mod_base = OTHER; note = 2'-O-methyl-adenosine-3'-phosphate
  modified_base 5: mod_base = OTHER; note = 2'-deoxy-2'-fluoro-adenosine-3'-phosphate
  modified_base 6: mod_base = OTHER; note = 2'-O-methyl-guanosine-3'-phosphate
  modified_base 7: mod_base = OTHER; note = 2'-deoxy-2'-fluoro-adenosine-3'-phosphate
  modified_base 8: mod_base = OTHER; note = 2'-deoxy-2'-fluoro-cytidine-3'-phosphate
  modified_base 9: mod_base = OTHER; note = 2'-deoxy-2'-fluoro-adenosine-3'-phosphate
  modified_base 10: mod_base = OTHER; note = 2'-O-methyl-uridine-3'-phosphate
  modified_base 11: mod_base = OTHER; note = 2'-O-methyl-guanosine-3'-phosphate
  modified_base 12: mod_base = OTHER; note = 2'-O-methyl-uridine-3'-phosphate
  modified_base 13: mod_base = OTHER; note = 2'-O-methyl-uridine-3'-phosphate
  modified_base 14: mod_base = OTHER; note = 2'-O-methyl-adenosine-3'-phosphate
  modified_base 15: mod_base = OTHER; note = 2'-O-methyl-cytidine-3'-phosphate
  modified_base 16: mod_base = OTHER; note = 2'-O-methyl-uridine-3'-phosphate
  modified_base 17: mod_base = OTHER; note = 2'-O-methyl-adenosine-3'-phosphate
  modified_base 18: mod_base = OTHER; note = 2'-O-methyl-adenosine-3'-phosphate
  modified_base 19: mod_base = OTHER; note = 2'-O-methyl-adenosine-3'-phosphate
ttgaagacatgttactaaa

SEQ ID NO: 1566 - RNA, 19 nt, synthetic construct
  source 1..19: mol_type = other RNA
  modified_base 1: mod_base = OTHER; note = 2'-O-methyl-uridine-3'-phosphorothioate
  modified_base 2: mod_base = OTHER; note = 2'-O-methyl-guanosine-3'-phosphorothioate
  modified_base 3: mod_base = OTHER; note = 2'-O-methyl-adenosine-3'-phosphate
  modified_base 4: mod_base = OTHER; note = 2'-O-methyl-adenosine-3'-phosphate
  modified_base 5: mod_base = OTHER; note = 2'-deoxy-2'-fluoro-guanosine-3'-phosphate
  modified_base 6: mod_base = OTHER; note = 2'-O-methyl-adenosine-3'-phosphate
  modified_base 7: mod_base = OTHER; note = 2'-deoxy-2'-fluoro-cytidine-3'-phosphate
  modified_base 8: mod_base = OTHER; note = 2'-deoxy-2'-fluoro-adenosine-3'-phosphate
  modified_base 9: mod_base = OTHER; note = 2'-deoxy-2'-fluoro-uridine-3'-phosphate
  modified_base 10: mod_base = OTHER; note = 2'-O-methyl-guanosine-3'-phosphate
  modified_base 11: mod_base = OTHER; note = 2'-O-methyl-uridine-3'-phosphate
  modified_base 12: mod_base = OTHER; note = 2'-O-methyl-uridine-3'-phosphate
  modified_base 13: mod_base = OTHER; note = 2'-O-methyl-adenosine-3'-phosphate
  modified_base 14: mod_base = OTHER; note = 2'-O-methyl-cytidine-3'-phosphate
  modified_base 15: mod_base = OTHER; note = 2'-O-methyl-uridine-3'-phosphate
  modified_base 16: mod_base = OTHER; note = 2'-O-methyl-adenosine-3'-phosphate
  modified_base 17: mod_base = OTHER; note = 2'-O-methyl-adenosine-3'-phosphate
  modified_base 18: mod_base = OTHER; note = 2'-O-methyl-uridine-3'-phosphate
  modified_base 19: mod_base = OTHER; note = 2'-O-methyl-adenosine-3'-phosphate
tgaagacatgttactaata

SEQ ID NO: 1567 - RNA, 19 nt, synthetic construct
  source 1..19: mol_type = other RNA
  modified_base 1: mod_base = OTHER; note = 2'-O-methyl-adenosine-3'-phosphorothioate
  modified_base 2: mod_base = OTHER; note = 2'-O-methyl-cytidine-3'-phosphorothioate
  modified_base 3: mod_base = OTHER; note = 2'-O-methyl-adenosine-3'-phosphate
  modified_base 4: mod_base = OTHER; note = 2'-O-methyl-uridine-3'-phosphate
  modified_base 5: mod_base = OTHER; note = 2'-deoxy-2'-fluoro-guanosine-3'-phosphate
  modified_base 6: mod_base = OTHER; note = 2'-O-methyl-uridine-3'-phosphate
  modified_base 7: mod_base = OTHER; note = 2'-deoxy-2'-fluoro-uridine-3'-phosphate
  modified_base 8: mod_base = OTHER; note = 2'-deoxy-2'-fluoro-adenosine-3'-phosphate
  modified_base 9: mod_base = OTHER; note = 2'-deoxy-2'-fluoro-cytidine-3'-phosphate
  modified_base 10: mod_base = OTHER; note = 2'-O-methyl-uridine-3'-phosphate
  modified_base 11: mod_base = OTHER; note = 2'-O-methyl-adenosine-3'-phosphate
  modified_base 12: mod_base = OTHER; note = 2'-O-methyl-adenosine-3'-phosphate
  modified_base 13: mod_base = OTHER; note = 2'-O-methyl-uridine-3'-phosphate
  modified_base 14: mod_base = OTHER; note = 2'-O-methyl-adenosine-3'-phosphate
  modified_base 15: mod_base = OTHER; note = 2'-O-methyl-uridine-3'-phosphate
  modified_base 16: mod_base = OTHER; note = 2'-O-methyl-adenosine-3'-phosphate
  modified_base 17: mod_base = OTHER; note = 2'-O-methyl-adenosine-3'-phosphate
  modified_base 18: mod_base = OTHER; note = 2'-O-methyl-cytidine-3'-phosphate
  modified_base 19: mod_base = OTHER; note = 2'-O-methyl-adenosine-3'-phosphate
acatgttactaatataaca

SEQ ID NO: 1568 - RNA, 19 nt, synthetic construct
  source 1..19: mol_type = other RNA
  modified_base 1: mod_base = OTHER; note = 2'-O-methyl-adenosine-3'-phosphorothioate
  modified_base 2: mod_base = OTHER; note = 2'-O-methyl-guanosine-3'-phosphorothioate
  modified_base 3: mod_base = OTHER; note = 2'-O-methyl-adenosine-3'-phosphate
  modified_base 4: mod_base = OTHER; note = 2'-O-methyl-guanosine-3'-phosphate
  modified_base 5: mod_base = OTHER; note = 2'-deoxy-2'-fluoro-uridine-3'-phosphate
  modified_base 6: mod_base = OTHER; note = 2'-O-methyl-adenosine-3'-phosphate
  modified_base 7: mod_base = OTHER; note = 2'-deoxy-2'-fluoro-guanosine-3'-phosphate
  modified_base 8: mod_base = OTHER; note = 2'-deoxy-2'-fluoro-adenosine-3'-phosphate
  modified_base 9: mod_base = OTHER; note = 2'-deoxy-2'-fluoro-guanosine-3'-phosphate
  modified_base 10: mod_base = OTHER; note = 2'-O-methyl-guanosine-3'-phosphate
  modified_base 11: mod_base = OTHER; note = 2'-O-methyl-adenosine-3'-phosphate
  modified_base 12: mod_base = OTHER; note = 2'-O-methyl-uridine-3'-phosphate
  modified_base 13: mod_base = OTHER; note = 2'-O-methyl-guanosine-3'-phosphate
  modified_base 14: mod_base = OTHER; note = 2'-O-methyl-uridine-3'-phosphate
  modified_base 15: mod_base = OTHER; note = 2'-O-methyl-guanosine-3'-phosphate
  modified_base 16: mod_base = OTHER; note = 2'-O-methyl-uridine-3'-phosphate
  modified_base 17: mod_base = OTHER; note = 2'-O-methyl-adenosine-3'-phosphate
  modified_base 18: mod_base = OTHER; note = 2'-O-methyl-adenosine-3'-phosphate
  modified_base 19: mod_base = OTHER; note = 2'-O-methyl-adenosine-3'-phosphate
agagtagaggatgtgtaaa

SEQ ID NO: 1569 - RNA, 19 nt, synthetic construct
  source 1..19: mol_type = other RNA
  modified_base 1: mod_base = OTHER; note = 2'-O-methyl-guanosine-3'-phosphorothioate
  modified_base 2: mod_base = OTHER; note = 2'-O-methyl-uridine-3'-phosphorothioate
  modified_base 3: mod_base = OTHER; note = 2'-O-methyl-guanosine-3'-phosphate
  modified_base 4: mod_base = OTHER; note = 2'-O-methyl-uridine-3'-phosphate
  modified_base 5: mod_base = OTHER; note = 2'-deoxy-2'-fluoro-adenosine-3'-phosphate
  modified_base 6: mod_base = OTHER; note = 2'-O-methyl-adenosine-3'-phosphate
  modified_base 7: mod_base = OTHER; note = 2'-deoxy-2'-fluoro-uridine-3'-phosphate
  modified_base 8: mod_base = OTHER; note = 2'-deoxy-2'-fluoro-uridine-3'-phosphate
  modified_base 9: mod_base = OTHER; note = 2'-deoxy-2'-fluoro-adenosine-3'-phosphate
  modified_base 10: mod_base = OTHER; note = 2'-O-methyl-adenosine-3'-phosphate
  modified_base 11: mod_base = OTHER; note = 2'-O-methyl-cytidine-3'-phosphate
  modified_base 12: mod_base = OTHER; note = 2'-O-methyl-cytidine-3'-phosphate
  modified_base 13: mod_base = OTHER; note = 2'-O-methyl-adenosine-3'-phosphate
  modified_base 14: mod_base = OTHER; note = 2'-O-methyl-uridine-3'-phosphate
  modified_base 15: mod_base = OTHER; note = 2'-O-methyl-adenosine-3'-phosphate
  modified_base 16: mod_base = OTHER; note = 2'-O-methyl-uridine-3'-phosphate
  modified_base 17: mod_base = OTHER; note = 2'-O-methyl-cytidine-3'-phosphate
  modified_base 18: mod_base = OTHER; note = 2'-O-methyl-uridine-3'-phosphate
  modified_base 19: mod_base = OTHER; note = 2'-O-methyl-adenosine-3'-phosphate
gtgtaattaaccatatcta

SEQ ID NO: 1570 - RNA, 19 nt, synthetic construct
  source 1..19: mol_type = other RNA
  modified_base 1: mod_base = OTHER; note = 2'-O-methyl-adenosine-3'-phosphorothioate
  modified_base 2: mod_base = OTHER; note = 2'-O-methyl-adenosine-3'-phosphorothioate
  modified_base 3: mod_base = OTHER; note = 2'-O-methyl-uridine-3'-phosphate
  modified_base 4: mod_base = OTHER; note = 2'-O-methyl-adenosine-3'-phosphate
  modified_base 5: mod_base = OTHER; note = 2'-deoxy-2'-fluoro-uridine-3'-phosphate
  modified_base 6: mod_base = OTHER; note = 2'-O-methyl-uridine-3'-phosphate
  modified_base 7: mod_base = OTHER; note = 2'-deoxy-2'-fluoro-guanosine-3'-phosphate
  modified_base 8: mod_base = OTHER; note = 2'-deoxy-2'-fluoro-adenosine-3'-phosphate
  modified_base 9: mod_base = OTHER; note = 2'-deoxy-2'-fluoro-cytidine-3'-phosphate
  modified_base 10: mod_base = OTHER; note = 2'-O-methyl-cytidine-3'-phosphate
  modified_base 11: mod_base = OTHER; note = 2'-O-methyl-uridine-3'-phosphate
  modified_base 12: mod_base = OTHER; note = 2'-O-methyl-uridine-3'-phosphate
  modified_base 13: mod_base = OTHER; note = 2'-O-methyl-guanosine-3'-phosphate
  modified_base 14: mod_base = OTHER; note = 2'-O-methyl-guanosine-3'-phosphate
  modified_base 15: mod_base = OTHER; note = 2'-O-methyl-uridine-3'-phosphate
  modified_base 16: mod_base = OTHER; note = 2'-O-methyl-uridine-3'-phosphate
  modified_base 17: mod_base = OTHER; note = 2'-O-methyl-uridine-3'-phosphate
  modified_base 18: mod_base = OTHER; note = 2'-O-methyl-cytidine-3'-phosphate
  modified_base 19: mod_base = OTHER; note = 2'-O-methyl-adenosine-3'-phosphate
aatattgaccttggtttca

SEQ ID NO: 1571 - RNA, 19 nt, synthetic construct
  source 1..19: mol_type = other RNA
  modified_base 1: mod_base = OTHER; note = 2'-O-methyl-adenosine-3'-phosphorothioate
  modified_base 2: mod_base = OTHER; note = 2'-O-methyl-uridine-3'-phosphorothioate
  modified_base 3: mod_base = OTHER; note = 2'-O-methyl-adenosine-3'-phosphate
  modified_base 4: mod_base = OTHER; note = 2'-O-methyl-uridine-3'-phosphate
  modified_base 5: mod_base = OTHER; note = 2'-deoxy-2'-fluoro-uridine-3'-phosphate
  modified_base 6: mod_base = OTHER; note = 2'-O-methyl-guanosine-3'-phosphate
  modified_base 7: mod_base = OTHER; note = 2'-deoxy-2'-fluoro-adenosine-3'-phosphate
  modified_base 8: mod_base = OTHER; note = 2'-deoxy-2'-fluoro-cytidine-3'-phosphate
  modified_base 9: mod_base = OTHER; note = 2'-deoxy-2'-fluoro-cytidine-3'-phosphate
  modified_base 10: mod_base = OTHER; note = 2'-O-methyl-uridine-3'-phosphate
  modified_base 11: mod_base = OTHER; note = 2'-O-methyl-uridine-3'-phosphate
  modified_base 12: mod_base = OTHER; note = 2'-O-methyl-guanosine-3'-phosphate
  modified_base 13: mod_base = OTHER; note = 2'-O-methyl-guanosine-3'-phosphate
  modified_base 14: mod_base = OTHER; note = 2'-O-methyl-uridine-3'-phosphate
  modified_base 15: mod_base = OTHER; note = 2'-O-methyl-uridine-3'-phosphate
  modified_base 16: mod_base = OTHER; note = 2'-O-methyl-uridine-3'-phosphate
  modified_base 17: mod_base = OTHER; note = 2'-O-methyl-cytidine-3'-phosphate
  modified_base 18: mod_base = OTHER; note = 2'-O-methyl-uridine-3'-phosphate
  modified_base 19: mod_base = OTHER; note = 2'-O-methyl-adenosine-3'-phosphate
atattgaccttggtttcta

SEQ ID NO: 1572 - RNA, 19 nt, synthetic construct
  source 1..19: mol_type = other RNA
  modified_base 1: mod_base = OTHER; note = 2'-O-methyl-adenosine-3'-phosphorothioate
  modified_base 2: mod_base = OTHER; note = 2'-O-methyl-uridine-3'-phosphorothioate
  modified_base 3: mod_base = OTHER; note = 2'-O-methyl-uridine-3'-phosphate
  modified_base 4: mod_base = OTHER; note = 2'-O-methyl-guanosine-3'-phosphate
  modified_base 5: mod_base = OTHER; note = 2'-deoxy-2'-fluoro-adenosine-3'-phosphate
  modified_base 6: mod_base = OTHER; note = 2'-O-methyl-cytidine-3'-phosphate
  modified_base 7: mod_base = OTHER; note = 2'-deoxy-2'-fluoro-cytidine-3'-phosphate
  modified_base 8: mod_base = OTHER; note = 2'-deoxy-2'-fluoro-uridine-3'-phosphate
  modified_base 9: mod_base = OTHER; note = 2'-deoxy-2'-fluoro-uridine-3'-phosphate
  modified_base 10: mod_base = OTHER; note = 2'-O-methyl-guanosine-3'-phosphate
  modified_base 11: mod_base = OTHER; note = 2'-O-methyl-guanosine-3'-phosphate
  modified_base 12: mod_base = OTHER; note = 2'-O-methyl-uridine-3'-phosphate
  modified_base 13: mod_base = OTHER; note = 2'-O-methyl-uridine-3'-phosphate
  modified_base 14: mod_base = OTHER; note = 2'-O-methyl-uridine-3'-phosphate
  modified_base 15: mod_base = OTHER; note = 2'-O-methyl-cytidine-3'-phosphate
  modified_base 16: mod_base = OTHER; note = 2'-O-methyl-uridine-3'-phosphate
  modified_base 17: mod_base = OTHER; note = 2'-O-methyl-uridine-3'-phosphate
  modified_base 18: mod_base = OTHER; note = 2'-O-methyl-adenosine-3'-phosphate
  modified_base 19: mod_base = OTHER; note = 2'-O-methyl-adenosine-3'-phosphate
attgaccttggtttcttaa

SEQ ID NO: 1573 - RNA, 19 nt, synthetic construct
  source 1..19: mol_type = other RNA
  modified_base 1: mod_base = OTHER; note = 2'-O-methyl-adenosine-3'-phosphorothioate
  modified_base 2: mod_base = OTHER; note = 2'-O-methyl-cytidine-3'-phosphorothioate
  modified_base 3: mod_base = OTHER; note = 2'-O-methyl-cytidine-3'-phosphate
  modified_base 4: mod_base = OTHER; note = 2'-O-methyl-uridine-3'-phosphate
  modified_base 5: mod_base = OTHER; note = 2'-deoxy-2'-fluoro-uridine-3'-phosphate
  modified_base 6: mod_base = OTHER; note = 2'-O-methyl-guanosine-3'-phosphate
  modified_base 7: mod_base = OTHER; note = 2'-deoxy-2'-fluoro-guanosine-3'-phosphate
  modified_base 8: mod_base = OTHER; note = 2'-deoxy-2'-fluoro-uridine-3'-phosphate
  modified_base 9: mod_base = OTHER; note = 2'-deoxy-2'-fluoro-uridine-3'-phosphate
  modified_base 10: mod_base = OTHER; note = 2'-O-methyl-uridine-3'-phosphate
  modified_base 11: mod_base = OTHER; note = 2'-O-methyl-cytidine-3'-phosphate
  modified_base 12: mod_base = OTHER; note = 2'-O-methyl-uridine-3'-phosphate
  modified_base 13: mod_base = OTHER; note = 2'-O-methyl-uridine-3'-phosphate
  modified_base 14: mod_base = OTHER; note = 2'-O-methyl-adenosine-3'-phosphate
  modified_base 15: mod_base = OTHER; note = 2'-O-methyl-cytidine-3'-phosphate
  modified_base 16: mod_base = OTHER; note = 2'-O-methyl-adenosine-3'-phosphate
  modified_base 17: mod_base = OTHER; note = 2'-O-methyl-cytidine-3'-phosphate
  modified_base 18: mod_base = OTHER; note = 2'-O-methyl-adenosine-3'-phosphate
  modified_base 19: mod_base = OTHER; note = 2'-O-methyl-adenosine-3'-phosphate
accttggtttcttacacaa

SEQ ID NO: 1574 - RNA, 19 nt, synthetic construct
  source 1..19: mol_type = other RNA
  modified_base 1: mod_base = OTHER; note = 2'-O-methyl-guanosine-3'-phosphorothioate
  modified_base 2: mod_base = OTHER; note = 2'-O-methyl-guanosine-3'-phosphorothioate
  modified_base 3: mod_base = OTHER; note = 2'-O-methyl-uridine-3'-phosphate
  modified_base 4: mod_base = OTHER; note = 2'-O-methyl-uridine-3'-phosphate
  modified_base 5: mod_base = OTHER; note = 2'-deoxy-2'-fluoro-uridine-3'-phosphate
  modified_base 6: mod_base = OTHER; note = 2'-O-methyl-cytidine-3'-phosphate
  modified_base 7: mod_base = OTHER; note = 2'-deoxy-2'-fluoro-uridine-3'-phosphate
  modified_base 8: mod_base = OTHER; note = 2'-deoxy-2'-fluoro-uridine-3'-phosphate
  modified_base 9: mod_base = OTHER; note = 2'-deoxy-2'-fluoro-adenosine-3'-phosphate
  modified_base 10: mod_base = OTHER; note = 2'-O-methyl-cytidine-3'-phosphate
  modified_base 11: mod_base = OTHER; note = 2'-O-methyl-adenosine-3'-phosphate
  modified_base 12: mod_base = OTHER; note = 2'-O-methyl-cytidine-3'-phosphate
  modified_base 13: mod_base = OTHER; note = 2'-O-methyl-adenosine-3'-phosphate
  modified_base 14: mod_base = OTHER; note = 2'-O-methyl-adenosine-3'-phosphate
  modified_base 15: mod_base = OTHER; note = 2'-O-methyl-guanosine-3'-phosphate
  modified_base 16: mod_base = OTHER; note = 2'-O-methyl-uridine-3'-phosphate
  modified_base 17: mod_base = OTHER; note = 2'-O-methyl-guanosine-3'-phosphate
  modified_base 18: mod_base = OTHER; note = 2'-O-methyl-uridine-3'-phosphate
  modified_base 19: mod_base = OTHER; note = 2'-O-methyl-adenosine-3'-phosphate
ggtttcttacacaagtgta

SEQ ID NO: 1575 - RNA, 19 nt, synthetic construct
  source 1..19: mol_type = other RNA
  modified_base 1: mod_base = OTHER; note = 2'-O-methyl-uridine-3'-phosphorothioate
  modified_base 2: mod_base = OTHER; note = 2'-O-methyl-uridine-3'-phosphorothioate
  modified_base 3: mod_base = OTHER; note = 2'-O-methyl-uridine-3'-phosphate
  modified_base 4: mod_base = OTHER; note = 2'-O-methyl-cytidine-3'-phosphate
  modified_base 5: mod_base = OTHER; note = 2'-deoxy-2'-fluoro-uridine-3'-phosphate
  modified_base 6: mod_base = OTHER; note = 2'-O-methyl-uridine-3'-phosphate
  modified_base 7: mod_base = OTHER; note = 2'-deoxy-2'-fluoro-adenosine-3'-phosphate
  modified_base 8: mod_base = OTHER; note = 2'-deoxy-2'-fluoro-cytidine-3'-phosphate
  modified_base 9: mod_base = OTHER; note = 2'-deoxy-2'-fluoro-adenosine-3'-phosphate
  modified_base 10: mod_base = OTHER; note = 2'-O-methyl-cytidine-3'-phosphate
  modified_base 11: mod_base = OTHER; note = 2'-O-methyl-adenosine-3'-phosphate
  modified_base 12: mod_base = OTHER; note = 2'-O-methyl-adenosine-3'-phosphate
  modified_base 13: mod_base = OTHER; note = 2'-O-methyl-guanosine-3'-phosphate
  modified_base 14: mod_base = OTHER; note = 2'-O-methyl-uridine-3'-phosphate
  modified_base 15: mod_base = OTHER; note = 2'-O-methyl-guanosine-3'-phosphate
  modified_base 16: mod_base = OTHER; note = 2'-O-methyl-uridine-3'-phosphate
  modified_base 17: mod_base = OTHER; note = 2'-O-methyl-uridine-3'-phosphate
  modified_base 18: mod_base = OTHER; note = 2'-O-methyl-guanosine-3'-phosphate
  modified_base 19: mod_base = OTHER; note = 2'-O-methyl-adenosine-3'-phosphate
tttcttacacaagtgttga

SEQ ID NO: 1576 - RNA, 19 nt, synthetic construct
  source 1..19: mol_type = other RNA
  modified_base 1: mod_base = OTHER; note = 2'-O-methyl-uridine-3'-phosphorothioate
  modified_base 2: mod_base = OTHER; note = 2'-O-methyl-cytidine-3'-phosphorothioate
  modified_base 3: mod_base = OTHER; note = 2'-O-methyl-uridine-3'-phosphate
  modified_base 4: mod_base = OTHER; note = 2'-O-methyl-uridine-3'-phosphate
  modified_base 5: mod_base = OTHER; note = 2'-deoxy-2'-fluoro-adenosine-3'-phosphate
  modified_base 6: mod_base = OTHER; note = 2'-O-methyl-cytidine-3'-phosphate
  modified_base 7: mod_base = OTHER; note = 2'-deoxy-2'-fluoro-adenosine-3'-phosphate
  modified_base 8: mod_base = OTHER; note = 2'-deoxy-2'-fluoro-cytidine-3'-phosphate
  modified_base 9: mod_base = OTHER; note = 2'-deoxy-2'-fluoro-adenosine-3'-phosphate
  modified_base 10: mod_base = OTHER; note = 2'-O-methyl-adenosine-3'-phosphate
  modified_base 11: mod_base = OTHER; note = 2'-O-methyl-guanosine-3'-phosphate
  modified_base 12: mod_base = OTHER; note = 2'-O-methyl-uridine-3'-phosphate
  modified_base 13: mod_base = OTHER; note = 2'-O-methyl-guanosine-3'-phosphate
  modified_base 14: mod_base = OTHER; note = 2'-O-methyl-uridine-3'-phosphate
  modified_base 15: mod_base = OTHER; note = 2'-O-methyl-uridine-3'-phosphate
  modified_base 16: mod_base = OTHER; note = 2'-O-methyl-guanosine-3'-phosphate
  modified_base 17: mod_base = OTHER; note = 2'-O-methyl-cytidine-3'-phosphate
  modified_base 18: mod_base = OTHER; note = 2'-O-methyl-uridine-3'-phosphate
  modified_base 19: mod_base = OTHER; note = 2'-O-methyl-adenosine-3'-phosphate
tcttacacaagtgttgcta

SEQ ID NO: 1577 - RNA, 19 nt, synthetic construct
  source 1..19: mol_type = other RNA
  modified_base 1: mod_base = OTHER; note = 2'-O-methyl-adenosine-3'-phosphorothioate
  modified_base 2: mod_base = OTHER; note = 2'-O-methyl-cytidine-3'-phosphorothioate
  modified_base 3: mod_base = OTHER; note = 2'-O-methyl-adenosine-3'-phosphate
  modified_base 4: mod_base = OTHER; note = 2'-O-methyl-adenosine-3'-phosphate
  modified_base 5: mod_base = OTHER; note = 2'-deoxy-2'-fluoro-guanosine-3'-phosphate
  modified_base 6: mod_base = OTHER; note = 2'-O-methyl-uridine-3'-phosphate
  modified_base 7: mod_base = OTHER; note = 2'-deoxy-2'-fluoro-guanosine-3'-phosphate
  modified_base 8: mod_base = OTHER; note = 2'-deoxy-2'-fluoro-uridine-3'-phosphate
  modified_base 9: mod_base = OTHER; note = 2'-deoxy-2'-fluoro-uridine-3'-phosphate
  modified_base 10: mod_base = OTHER; note = 2'-O-methyl-guanosine-3'-phosphate
  modified_base 11: mod_base = OTHER; note = 2'-O-methyl-cytidine-3'-phosphate
  modified_base 12: mod_base = OTHER; note = 2'-O-methyl-uridine-3'-phosphate
  modified_base 13: mod_base = OTHER; note = 2'-O-methyl-adenosine-3'-phosphate
  modified_base 14: mod_base = OTHER; note = 2'-O-methyl-adenosine-3'-phosphate
  modified_base 15: mod_base = OTHER; note = 2'-O-methyl-cytidine-3'-phosphate
  modified_base 16: mod_base = OTHER; note = 2'-O-methyl-uridine-3'-phosphate
  modified_base 17: mod_base = OTHER; note = 2'-O-methyl-cytidine-3'-phosphate
  modified_base 18: mod_base = OTHER; note = 2'-O-methyl-adenosine-3'-phosphate
  modified_base 19: mod_base = OTHER; note = 2'-O-methyl-adenosine-3'-phosphate
acaagtgttgctaactcaa

SEQ ID NO: 1578 - RNA, 19 nt, synthetic construct
  source 1..19: mol_type = other RNA
  modified_base 1: mod_base = OTHER; note = 2'-O-methyl-adenosine-3'-phosphorothioate
  modified_base 2: mod_base = OTHER; note = 2'-O-methyl-guanosine-3'-phosphorothioate
  modified_base 3: mod_base = OTHER; note = 2'-O-methyl-uridine-3'-phosphate
  modified_base 4: mod_base = OTHER; note = 2'-O-methyl-guanosine-3'-phosphate
  modified_base 5: mod_base = OTHER; note = 2'-deoxy-2'-fluoro-uridine-3'-phosphate
  modified_base 6: mod_base = OTHER; note = 2'-O-methyl-uridine-3'-phosphate
  modified_base 7: mod_base = OTHER; note = 2'-deoxy-2'-fluoro-guanosine-3'-phosphate
  modified_base 8: mod_base = OTHER; note = 2'-deoxy-2'-fluoro-cytidine-3'-phosphate
  modified_base 9: mod_base = OTHER; note = 2'-deoxy-2'-fluoro-uridine-3'-phosphate
  modified_base 10: mod_base = OTHER; note = 2'-O-methyl-adenosine-3'-phosphate
  modified_base 11: mod_base = OTHER; note = 2'-O-methyl-adenosine-3'-phosphate
  modified_base 12: mod_base = OTHER; note = 2'-O-methyl-cytidine-3'-phosphate
  modified_base 13: mod_base = OTHER; note = 2'-O-methyl-uridine-3'-phosphate
  modified_base 14: mod_base = OTHER; note = 2'-O-methyl-cytidine-3'-phosphate
  modified_base 15: mod_base = OTHER; note = 2'-O-methyl-adenosine-3'-phosphate
  modified_base 16: mod_base = OTHER; note = 2'-O-methyl-adenosine-3'-phosphate
  modified_base 17: mod_base = OTHER; note = 2'-O-methyl-uridine-3'-phosphate
  modified_base 18: mod_base = OTHER; note = 2'-O-methyl-adenosine-3'-phosphate
  modified_base 19: mod_base = OTHER; note = 2'-O-methyl-adenosine-3'-phosphate
agtgttgctaactcaataa

SEQ ID NO: 1579 - RNA, 19 nt, synthetic construct
  source 1..19: mol_type = other RNA
  modified_base 1: mod_base = OTHER; note = 2'-O-methyl-guanosine-3'-phosphorothioate
  modified_base 2: mod_base = OTHER; note = 2'-O-methyl-uridine-3'-phosphorothioate
  modified_base 3: mod_base = OTHER; note = 2'-O-methyl-guanosine-3'-phosphate
  modified_base 4: mod_base = OTHER; note = 2'-O-methyl-uridine-3'-phosphate
  modified_base 5: mod_base = OTHER; note = 2'-deoxy-2'-fluoro-uridine-3'-phosphate
  modified_base 6: mod_base = OTHER; note = 2'-O-methyl-guanosine-3'-phosphate
  modified_base 7: mod_base = OTHER; note = 2'-deoxy-2'-fluoro-cytidine-3'-phosphate
  modified_base 8: mod_base = OTHER; note = 2'-deoxy-2'-fluoro-uridine-3'-phosphate
  modified_base 9: mod_base = OTHER; note = 2'-deoxy-2'-fluoro-adenosine-3'-phosphate
  modified_base 10: mod_base = OTHER; note = 2'-O-methyl-adenosine-3'-phosphate
  modified_base 11: mod_base = OTHER; note = 2'-O-methyl-cytidine-3'-phosphate
  modified_base 12: mod_base = OTHER; note = 2'-O-methyl-uridine-3'-phosphate
  modified_base 13: mod_base = OTHER; note = 2'-O-methyl-cytidine-3'-phosphate
  modified_base 14: mod_base = OTHER; note = 2'-O-methyl-adenosine-3'-phosphate
  modified_base 15: mod_base = OTHER; note = 2'-O-methyl-adenosine-3'-phosphate
  modified_base 16: mod_base = OTHER; note = 2'-O-methyl-uridine-3'-phosphate
  modified_base 17: mod_base = OTHER; note = 2'-O-methyl-adenosine-3'-phosphate
  modified_base 18: mod_base = OTHER; note = 2'-O-methyl-guanosine-3'-phosphate
  modified_base 19: mod_base = OTHER; note = 2'-O-methyl-adenosine-3'-phosphate
gtgttgctaactcaataga

SEQ ID NO: 1580 - RNA, 19 nt, synthetic construct
  source 1..19: mol_type = other RNA
  modified_base 1: mod_base = OTHER; note = 2'-O-methyl-uridine-3'-phosphorothioate
  modified_base 2: mod_base = OTHER; note = 2'-O-methyl-guanosine-3'-phosphorothioate
  modified_base 3: mod_base = OTHER; note = 2'-O-methyl-uridine-3'-phosphate
  modified_base 4: mod_base = OTHER; note = 2'-O-methyl-uridine-3'-phosphate
  modified_base 5: mod_base = OTHER; note = 2'-deoxy-2'-fluoro-guanosine-3'-phosphate
  modified_base 6: mod_base = OTHER; note = 2'-O-methyl-cytidine-3'-phosphate
  modified_base 7: mod_base = OTHER; note = 2'-deoxy-2'-fluoro-uridine-3'-phosphate
  modified_base 8: mod_base = OTHER; note = 2'-deoxy-2'-fluoro-adenosine-3'-phosphate
  modified_base 9: mod_base = OTHER; note = 2'-deoxy-2'-fluoro-adenosine-3'-phosphate
  modified_base 10: mod_base = OTHER; note = 2'-O-methyl-cytidine-3'-phosphate
  modified_base 11: mod_base = OTHER; note = 2'-O-methyl-uridine-3'-phosphate
  modified_base 12: mod_base = OTHER; note = 2'-O-methyl-cytidine-3'-phosphate
  modified_base 13: mod_base = OTHER; note = 2'-O-methyl-adenosine-3'-phosphate
  modified_base 14: mod_base = OTHER; note = 2'-O-methyl-adenosine-3'-phosphate
  modified_base 15: mod_base = OTHER; note = 2'-O-methyl-uridine-3'-phosphate
  modified_base 16: mod_base = OTHER; note = 2'-O-methyl-adenosine-3'-phosphate
  modified_base 17: mod_base = OTHER; note = 2'-O-methyl-guanosine-3'-phosphate
  modified_base 18: mod_base = OTHER; note = 2'-O-methyl-uridine-3'-phosphate
  modified_base 19: mod_base = OTHER; note = 2'-O-methyl-adenosine-3'-phosphate
tgttgctaactcaatagta

SEQ ID NO: 1581 - RNA, 19 nt, synthetic construct
  source 1..19: mol_type = other RNA
  modified_base 1: mod_base = OTHER; note = 2'-O-methyl-uridine-3'-phosphorothioate
  modified_base 2: mod_base = OTHER; note = 2'-O-methyl-uridine-3'-phosphorothioate
  modified_base 3: mod_base = OTHER; note = 2'-O-methyl-guanosine-3'-phosphate
  modified_base 4: mod_base = OTHER; note = 2'-O-methyl-cytidine-3'-phosphate
  modified_base 5: mod_base = OTHER; note = 2'-deoxy-2'-fluoro-uridine-3'-phosphate
  modified_base 6: mod_base = OTHER; note = 2'-O-methyl-adenosine-3'-phosphate
  modified_base 7: mod_base = OTHER; note = 2'-deoxy-2'-fluoro-adenosine-3'-phosphate
  modified_base 8: mod_base = OTHER; note = 2'-deoxy-2'-fluoro-cytidine-3'-phosphate
  modified_base 9: mod_base = OTHER; note = 2'-deoxy-2'-fluoro-uridine-3'-phosphate
  modified_base 10: mod_base = OTHER; note = 2'-O-methyl-cytidine-3'-phosphate
  modified_base 11: mod_base = OTHER; note = 2'-O-methyl-adenosine-3'-phosphate
  modified_base 12: mod_base = OTHER; note = 2'-O-methyl-adenosine-3'-phosphate
  modified_base 13: mod_base = OTHER; note = 2'-O-methyl-uridine-3'-phosphate
  modified_base 14: mod_base = OTHER; note = 2'-O-methyl-adenosine-3'-phosphate
  modified_base 15: mod_base = OTHER; note = 2'-O-methyl-guanosine-3'-phosphate
  modified_base 16: mod_base = OTHER; note = 2'-O-methyl-uridine-3'-phosphate
  modified_base 17: mod_base = OTHER; note = 2'-O-methyl-guanosine-3'-phosphate
  modified_base 18: mod_base = OTHER; note = 2'-O-methyl-adenosine-3'-phosphate
  modified_base 19: mod_base = OTHER; note = 2'-O-methyl-adenosine-3'-phosphate
ttgctaactcaatagtgaa

SEQ ID NO: 1582 - RNA, 19 nt, synthetic construct
  source 1..19: mol_type = other RNA
  modified_base 1: mod_base = OTHER; note = 2'-O-methyl-uridine-3'-phosphorothioate
  modified_base 2: mod_base = OTHER; note = 2'-O-methyl-guanosine-3'-phosphorothioate
  modified_base 3: mod_base = OTHER; note = 2'-O-methyl-cytidine-3'-phosphate
  modified_base 4: mod_base = OTHER; note = 2'-O-methyl-uridine-3'-phosphate
  modified_base 5: mod_base = OTHER; note = 2'-deoxy-2'-fluoro-adenosine-3'-phosphate
  modified_base 6: mod_base = OTHER; note = 2'-O-methyl-adenosine-3'-phosphate
  modified_base 7: mod_base = OTHER; note = 2'-deoxy-2'-fluoro-cytidine-3'-phosphate
  modified_base 8: mod_base = OTHER; note = 2'-deoxy-2'-fluoro-uridine-3'-phosphate
  modified_base 9: mod_base = OTHER; note = 2'-deoxy-2'-fluoro-cytidine-3'-phosphate
  modified_base 10: mod_base = OTHER; note = 2'-O-methyl-adenosine-3'-phosphate
  modified_base 11: mod_base = OTHER; note = 2'-O-methyl-adenosine-3'-phosphate
  modified_base 12: mod_base = OTHER; note = 2'-O-methyl-uridine-3'-phosphate
  modified_base 13: mod_base = OTHER; note = 2'-O-methyl-adenosine-3'-phosphate
  modified_base 14: mod_base = OTHER; note = 2'-O-methyl-guanosine-3'-phosphate
  modified_base 15: mod_base = OTHER; note = 2'-O-methyl-uridine-3'-phosphate
  modified_base 16: mod_base = OTHER; note = 2'-O-methyl-guanosine-3'-phosphate
  modified_base 17: mod_base = OTHER; note = 2'-O-methyl-adenosine-3'-phosphate
  modified_base 18: mod_base = OTHER; note = 2'-O-methyl-adenosine-3'-phosphate
  modified_base 19: mod_base = OTHER; note = 2'-O-methyl-adenosine-3'-phosphate
tgctaactcaatagtgaaa

SEQ ID NO: 1583 - RNA, 19 nt, synthetic construct
  source 1..19: mol_type = other RNA
  modified_base 1: mod_base = OTHER; note = 2'-O-methyl-adenosine-3'-phosphorothioate
  modified_base 2: mod_base = OTHER; note = 2'-O-methyl-adenosine-3'-phosphorothioate
  modified_base 3: mod_base = OTHER; note = 2'-O-methyl-cytidine-3'-phosphate
  modified_base 4: mod_base = OTHER; note = 2'-O-methyl-uridine-3'-phosphate
  modified_base 5: mod_base = OTHER; note = 2'-deoxy-2'-fluoro-cytidine-3'-phosphate
  modified_base 6: mod_base = OTHER; note = 2'-O-methyl-adenosine-3'-phosphate
  modified_base 7: mod_base = OTHER; note = 2'-deoxy-2'-fluoro-adenosine-3'-phosphate
  modified_base 8: mod_base = OTHER; note = 2'-deoxy-2'-fluoro-uridine-3'-phosphate
  modified_base 9: mod_base = OTHER; note = 2'-deoxy-2'-fluoro-adenosine-3'-phosphate
  modified_base 10: mod_base = OTHER; note = 2'-O-methyl-guanosine-3'-phosphate
  modified_base 11: mod_base = OTHER; note = 2'-O-methyl-uridine-3'-phosphate
  modified_base 12: mod_base = OTHER; note = 2'-O-methyl-guanosine-3'-phosphate
  modified_base 13: mod_base = OTHER; note = 2'-O-methyl-adenosine-3'-phosphate
  modified_base 14: mod_base = OTHER; note = 2'-O-methyl-adenosine-3'-phosphate
  modified_base 15: mod_base = OTHER; note = 2'-O-methyl-guanosine-3'-phosphate
  modified_base 16: mod_base = OTHER; note = 2'-O-methyl-guanosine-3'-phosphate
  modified_base 17: mod_base = OTHER; note = 2'-O-methyl-adenosine-3'-phosphate
  modified_base 18: mod_base = OTHER; note = 2'-O-methyl-guanosine-3'-phosphate
  modified_base 19: mod_base = OTHER; note = 2'-O-methyl-adenosine-3'-phosphate
aactcaatagtgaaggaga

SEQ ID NO: 1584 - RNA, 19 nt, synthetic construct
  source 1..19: mol_type = other RNA
  modified_base 1: mod_base = OTHER; note = 2'-O-methyl-cytidine-3'-phosphorothioate
  modified_base 2: mod_base = OTHER; note = 2'-O-methyl-uridine-3'-phosphorothioate
  modified_base 3: mod_base = OTHER; note = 2'-O-methyl-cytidine-3'-phosphate
  modified_base 4: mod_base = OTHER; note = 2'-O-methyl-adenosine-3'-phosphate
  modified_base 5: mod_base = OTHER; note = 2'-deoxy-2'-fluoro-adenosine-3'-phosphate
  modified_base 6: mod_base = OTHER; note = 2'-O-methyl-uridine-3'-phosphate
  modified_base 7: mod_base = OTHER; note = 2'-deoxy-2'-fluoro-adenosine-3'-phosphate
  modified_base 8: mod_base = OTHER; note = 2'-deoxy-2'-fluoro-guanosine-3'-phosphate
  modified_base 9: mod_base = OTHER; note = 2'-deoxy-2'-fluoro-uridine-3'-phosphate
  modified_base 10: mod_base = OTHER; note = 2'-O-methyl-guanosine-3'-phosphate
  modified_base 11: mod_base = OTHER; note = 2'-O-methyl-adenosine-3'-phosphate
  modified_base 12: mod_base = OTHER; note = 2'-O-methyl-adenosine-3'-phosphate
  modified_base 13: mod_base = OTHER; note = 2'-O-methyl-guanosine-3'-phosphate
  modified_base 14: mod_base = OTHER; note = 2'-O-methyl-guanosine-3'-phosphate
  modified_base 15: mod_base = OTHER; note = 2'-O-methyl-adenosine-3'-phosphate
  modified_base 16: mod_base = OTHER; note = 2'-O-methyl-guanosine-3'-phosphate
  modified_base 17: mod_base = OTHER; note = 2'-O-methyl-adenosine-3'-phosphate
  modified_base 18: mod_base = OTHER; note = 2'-O-methyl-cytidine-3'-phosphate
  modified_base 19: mod_base = OTHER; note = 2'-O-methyl-adenosine-3'-phosphate
ctcaatagtgaaggagaca

SEQ ID NO: 1585 - RNA, 19 nt, synthetic construct
  source 1..19: mol_type = other RNA
  modified_base 1: mod_base = OTHER; note = 2'-O-methyl-uridine-3'-phosphorothioate
  modified_base 2: mod_base = OTHER; note = 2'-O-methyl-guanosine-3'-phosphorothioate
  modified_base 3: mod_base = OTHER; note = 2'-O-methyl-guanosine-3'-phosphate
  modified_base 4: mod_base = OTHER; note = 2'-O-methyl-adenosine-3'-phosphate
  modified_base 5: mod_base = OTHER; note = 2'-deoxy-2'-fluoro-adenosine-3'-phosphate
  modified_base 6: mod_base = OTHER; note = 2'-O-methyl-adenosine-3'-phosphate
  modified_base 7: mod_base = OTHER; note = 2'-deoxy-2'-fluoro-guanosine-3'-phosphate
  modified_base 8: mod_base = OTHER; note = 2'-deoxy-2'-fluoro-uridine-3'-phosphate
  modified_base 9: mod_base = OTHER; note = 2'-deoxy-2'-fluoro-guanosine-3'-phosphate
  modified_base 10: mod_base = OTHER; note = 2'-O-methyl-uridine-3'-phosphate
  modified_base 11: mod_base = OTHER; note = 2'-O-methyl-uridine-3'-phosphate
  modified_base 12: mod_base = OTHER; note = 2'-O-methyl-uridine-3'-phosphate
  modified_base 13: mod_base = OTHER; note = 2'-O-methyl-guanosine-3'-phosphate
  modified_base 14: mod_base = OTHER; note = 2'-O-methyl-guanosine-3'-phosphate
  modified_base 15: mod_base = OTHER; note = 2'-O-methyl-uridine-3'-phosphate
  modified_base 16: mod_base = OTHER; note = 2'-O-methyl-uridine-3'-phosphate
  modified_base 17: mod_base = OTHER; note = 2'-O-methyl-cytidine-3'-phosphate
  modified_base 18: mod_base = OTHER; note = 2'-O-methyl-adenosine-3'-phosphate
  modified_base 19: mod_base = OTHER; note = 2'-O-methyl-adenosine-3'-phosphate
tggaaagtgtttggttcaa

SEQ ID NO: 1586 - RNA, 19 nt, synthetic construct
  source 1..19: mol_type = other RNA
  modified_base 1: mod_base = OTHER; note = 2'-O-methyl-uridine-3'-phosphorothioate
  modified_base 2: mod_base = OTHER; note = 2'-O-methyl-uridine-3'-phosphorothioate
  modified_base 3: mod_base = OTHER; note = 2'-O-methyl-uridine-3'-phosphate
  modified_base 4: mod_base = OTHER; note = 2'-O-methyl-guanosine-3'-phosphate
  modified_base 5: mod_base = OTHER; note = 2'-deoxy-2'-fluoro-guanosine-3'-phosphate
  modified_base 6: mod_base = OTHER; note = 2'-O-methyl-uridine-3'-phosphate
  modified_base 7: mod_base = OTHER; note = 2'-deoxy-2'-fluoro-uridine-3'-phosphate
  modified_base 8: mod_base = OTHER; note = 2'-deoxy-2'-fluoro-cytidine-3'-phosphate
  modified_base 9: mod_base = OTHER; note = 2'-deoxy-2'-fluoro-adenosine-3'-phosphate
  modified_base 10: mod_base = OTHER; note = 2'-O-methyl-guanosine-3'-phosphate
  modified_base 11: mod_base = OTHER; note = 2'-O-methyl-guanosine-3'-phosphate
  modified_base 12: mod_base = OTHER; note = 2'-O-methyl-guanosine-3'-phosphate
  modified_base 13: mod_base = OTHER; note = 2'-O-methyl-adenosine-3'-phosphate
  modified_base 14: mod_base = OTHER; note = 2'-O-methyl-uridine-3'-phosphate
  modified_base 15: mod_base = OTHER; note = 2'-O-methyl-adenosine-3'-phosphate
  modified_base 16: mod_base = OTHER; note = 2'-O-methyl-uridine-3'-phosphate
  modified_base 17: mod_base = OTHER; note = 2'-O-methyl-cytidine-3'-phosphate
  modified_base 18: mod_base = OTHER; note = 2'-O-methyl-uridine-3'-phosphate
  modified_base 19: mod_base = OTHER; note = 2'-O-methyl-adenosine-3'-phosphate
tttggttcagggatatcta

SEQ ID NO: 1587 - RNA, 19 nt, synthetic construct
  source 1..19: mol_type = other RNA
  modified_base 1: mod_base = OTHER; note = 2'-O-methyl-uridine-3'-phosphorothioate
  modified_base 2: mod_base = OTHER; note = 2'-O-methyl-uridine-3'-phosphorothioate
  modified_base 3: mod_base = OTHER; note = 2'-O-methyl-guanosine-3'-phosphate
  modified_base 4: mod_base = OTHER; note = 2'-O-methyl-guanosine-3'-phosphate
  modified_base 5: mod_base = OTHER; note = 2'-deoxy-2'-fluoro-uridine-3'-phosphate
  modified_base 6: mod_base = OTHER; note = 2'-O-methyl-uridine-3'-phosphate
  modified_base 7: mod_base = OTHER; note = 2'-deoxy-2'-fluoro-cytidine-3'-phosphate
  modified_base 8: mod_base = OTHER; note = 2'-deoxy-2'-fluoro-adenosine-3'-phosphate
  modified_base 9: mod_base = OTHER; note = 2'-deoxy-2'-fluoro-guanosine-3'-phosphate
  modified_base 10: mod_base = OTHER; note = 2'-O-methyl-guanosine-3'-phosphate
  modified_base 11: mod_base = OTHER; note = 2'-O-methyl-guanosine-3'-phosphate
  modified_base 12: mod_base = OTHER; note = 2'-O-methyl-adenosine-3'-phosphate
  modified_base 13: mod_base = OTHER; note = 2'-O-methyl-uridine-3'-phosphate
  modified_base 14: mod_base = OTHER; note = 2'-O-methyl-adenosine-3'-phosphate
  modified_base 15: mod_base = OTHER; note = 2'-O-methyl-uridine-3'-phosphate
  modified_base 16: mod_base = OTHER; note = 2'-O-methyl-cytidine-3'-phosphate
  modified_base 17: mod_base = OTHER; note = 2'-O-methyl-uridine-3'-phosphate
  modified_base 18: mod_base = OTHER; note = 2'-O-methyl-guanosine-3'-phosphate
  modified_base 19: mod_base = OTHER; note = 2'-O-methyl-adenosine-3'-phosphate
ttggttcagggatatctga

SEQ ID NO: 1588 - RNA, 19 nt, synthetic construct
  source 1..19: mol_type = other RNA
  modified_base 1: mod_base = OTHER; note = 2'-O-methyl-guanosine-3'-phosphorothioate
  modified_base 2: mod_base = OTHER; note = 2'-O-methyl-cytidine-3'-phosphorothioate
  modified_base 3: mod_base = OTHER; note = 2'-O-methyl-adenosine-3'-phosphate
  modified_base 4: mod_base = OTHER; note = 2'-O-methyl-guanosine-3'-phosphate
  modified_base 5: mod_base = OTHER; note = 2'-deoxy-2'-fluoro-adenosine-3'-phosphate
  modified_base 6: mod_base = OTHER; note = 2'-O-methyl-guanosine-3'-phosphate
  modified_base 7: mod_base = OTHER; note = 2'-deoxy-2'-fluoro-adenosine-3'-phosphate
  modified_base 8: mod_base = OTHER; note = 2'-deoxy-2'-fluoro-uridine-3'-phosphate
  modified_base 9: mod_base = OTHER; note = 2'-deoxy-2'-fluoro-uridine-3'-phosphate
  modified_base 10: mod_base = OTHER; note = 2'-O-methyl-uridine-3'-phosphate
  modified_base 11: mod_base = OTHER; note = 2'-O-methyl-cytidine-3'-phosphate
  modified_base 12: mod_base = OTHER; note = 2'-O-methyl-uridine-3'-phosphate
  modified_base 13: mod_base = OTHER; note = 2'-O-methyl-uridine-3'-phosphate
  modified_base 14: mod_base = OTHER; note = 2'-O-methyl-adenosine-3'-phosphate
  modified_base 15: mod_base = OTHER; note = 2'-O-methyl-adenosine-3'-phosphate
  modified_base 16: mod_base = OTHER; note = 2'-O-methyl-guanosine-3'-phosphate
  modified_base 17: mod_base = OTHER; note = 2'-O-methyl-uridine-3'-phosphate
  modified_base 18: mod_base = OTHER; note = 2'-O-methyl-guanosine-3'-phosphate
  modified_base 19: mod_base = OTHER; note = 2'-O-methyl-adenosine-3'-phosphate
gcagagatttcttaagtga

SEQ ID NO: 1589 - RNA, 19 nt, synthetic construct
  source 1..19: mol_type = other RNA
  modified_base 1: mod_base = OTHER; note = 2'-O-methyl-uridine-3'-phosphorothioate
  modified_base 2: mod_base = OTHER; note = 2'-O-methyl-adenosine-3'-phosphorothioate
  modified_base 3: mod_base = OTHER; note = 2'-O-methyl-adenosine-3'-phosphate
  modified_base 4: mod_base = OTHER; note = 2'-O-methyl-guanosine-3'-phosphate
  modified_base 5: mod_base = OTHER; note = 2'-deoxy-2'-fluoro-uridine-3'-phosphate
  modified_base 6: mod_base = OTHER; note = 2'-O-methyl-guanosine-3'-phosphate
  modified_base 7: mod_base = OTHER; note = 2'-deoxy-2'-fluoro-adenosine-3'-phosphate
  modified_base 8: mod_base = OTHER; note = 2'-deoxy-2'-fluoro-cytidine-3'-phosphate
  modified_base 9: mod_base = OTHER; note = 2'-deoxy-2'-fluoro-guanosine-3'-phosphate
  modified_base 10: mod_base = OTHER; note = 2'-O-methyl-cytidine-3'-phosphate
  modified_base 11: mod_base = OTHER; note = 2'-O-methyl-cytidine-3'-phosphate
  modified_base 12: mod_base = OTHER; note = 2'-O-methyl-uridine-3'-phosphate
  modified_base 13: mod_base = OTHER; note = 2'-O-methyl-cytidine-3'-phosphate
  modified_base 14: mod_base = OTHER; note = 2'-O-methyl-adenosine-3'-phosphate
  modified_base 15: mod_base = OTHER; note = 2'-O-methyl-uridine-3'-phosphate
  modified_base 16: mod_base = OTHER; note = 2'-O-methyl-cytidine-3'-phosphate
  modified_base 17: mod_base = OTHER; note = 2'-O-methyl-uridine-3'-phosphate
  modified_base 18: mod_base = OTHER; note = 2'-O-methyl-adenosine-3'-phosphate
  modified_base 19: mod_base = OTHER; note = 2'-O-methyl-adenosine-3'-phosphate
taagtgacgcctcatctaa

SEQ ID NO: 1590 - RNA, 19 nt, synthetic construct
  source 1..19: mol_type = other RNA
  modified_base 1: mod_base = OTHER; note = 2'-O-methyl-adenosine-3'-phosphorothioate
  modified_base 2: mod_base = OTHER; note = 2'-O-methyl-guanosine-3'-phosphorothioate
  modified_base 3: mod_base = OTHER; note = 2'-O-methyl-uridine-3'-phosphate
  modified_base 4: mod_base = OTHER; note = 2'-O-methyl-guanosine-3'-phosphate
  modified_base 5: mod_base = OTHER; note = 2'-deoxy-2'-fluoro-adenosine-3'-phosphate
  modified_base 6: mod_base = OTHER; note = 2'-O-methyl-cytidine-3'-phosphate
  modified_base 7: mod_base = OTHER; note = 2'-deoxy-2'-fluoro-guanosine-3'-phosphate
  modified_base 8: mod_base = OTHER; note = 2'-deoxy-2'-fluoro-cytidine-3'-phosphate
  modified_base 9: mod_base = OTHER; note = 2'-deoxy-2'-fluoro-cytidine-3'-phosphate
  modified_base 10: mod_base = OTHER; note = 2'-O-methyl-uridine-3'-phosphate
  modified_base 11: mod_base = OTHER; note = 2'-O-methyl-cytidine-3'-phosphate
  modified_base 12: mod_base = OTHER; note = 2'-O-methyl-adenosine-3'-phosphate
  modified_base 13: mod_base = OTHER; note = 2'-O-methyl-uridine-3'-phosphate
  modified_base 14: mod_base = OTHER; note = 2'-O-methyl-cytidine-3'-phosphate
  modified_base 15: mod_base = OTHER; note = 2'-O-methyl-uridine-3'-phosphate
  modified_base 16: mod_base = OTHER; note = 2'-O-methyl-adenosine-3'-phosphate
  modified_base 17: mod_base = OTHER; note = 2'-O-methyl-cytidine-3'-phosphate
  modified_base 18: mod_base = OTHER; note = 2'-O-methyl-adenosine-3'-phosphate
  modified_base 19: mod_base = OTHER; note = 2'-O-methyl-adenosine-3'-phosphate
agtgacgcctcatctacaa

SEQ ID NO: 1591 - RNA, 19 nt, synthetic construct
  source 1..19: mol_type = other RNA
  modified_base 1: mod_base = OTHER; note = 2'-O-methyl-guanosine-3'-phosphorothioate
  modified_base 2: mod_base = OTHER; note = 2'-O-methyl-adenosine-3'-phosphorothioate
  modified_base 3: mod_base = OTHER; note = 2'-O-methyl-cytidine-3'-phosphate
  modified_base 4: mod_base = OTHER; note = 2'-O-methyl-guanosine-3'-phosphate
  modified_base 5: mod_base = OTHER; note = 2'-deoxy-2'-fluoro-cytidine-3'-phosphate
  modified_base 6: mod_base = OTHER; note = 2'-O-methyl-cytidine-3'-phosphate
  modified_base 7: mod_base = OTHER; note = 2'-deoxy-2'-fluoro-uridine-3'-phosphate
  modified_base 8: mod_base = OTHER; note = 2'-deoxy-2'-fluoro-cytidine-3'-phosphate
  modified_base 9: mod_base = OTHER; note = 2'-deoxy-2'-fluoro-adenosine-3'-phosphate
  modified_base 10: mod_base = OTHER; note = 2'-O-methyl-uridine-3'-phosphate
  modified_base 11: mod_base = OTHER; note = 2'-O-methyl-cytidine-3'-phosphate
  modified_base 12: mod_base = OTHER; note = 2'-O-methyl-uridine-3'-phosphate
  modified_base 13: mod_base = OTHER; note = 2'-O-methyl-adenosine-3'-phosphate
  modified_base 14: mod_base = OTHER; note = 2'-O-methyl-cytidine-3'-phosphate
  modified_base 15: mod_base = OTHER; note = 2'-O-methyl-adenosine-3'-phosphate
  modified_base 16: mod_base = OTHER; note = 2'-O-methyl-adenosine-3'-phosphate
  modified_base 17: mod_base = OTHER; note = 2'-O-methyl-guanosine-3'-phosphate
  modified_base 18: mod_base = OTHER; note = 2'-O-methyl-cytidine-3'-phosphate
  modified_base 19: mod_base = OTHER; note = 2'-O-methyl-adenosine-3'-phosphate
gacgcctcatctacaagca

SEQ ID NO: 1592 - RNA, 19 nt, synthetic construct
  source 1..19: mol_type = other RNA
  modified_base 1: mod_base = OTHER; note = 2'-O-methyl-uridine-3'-phosphorothioate
  modified_base 2: mod_base = OTHER; note = 2'-O-methyl-cytidine-3'-phosphorothioate
  modified_base 3: mod_base = OTHER; note = 2'-O-methyl-adenosine-3'-phosphate
  modified_base 4: mod_base = OTHER; note = 2'-O-methyl-uridine-3'-phosphate
  modified_base 5: mod_base = OTHER; note = 2'-deoxy-2'-fluoro-cytidine-3'-phosphate
  modified_base 6: mod_base = OTHER; note = 2'-O-methyl-uridine-3'-phosphate
  modified_base 7: mod_base = OTHER; note = 2'-deoxy-2'-fluoro-adenosine-3'-phosphate
  modified_base 8: mod_base = OTHER; note = 2'-deoxy-2'-fluoro-cytidine-3'-phosphate
  modified_base 9: mod_base = OTHER; note = 2'-deoxy-2'-fluoro-adenosine-3'-phosphate
  modified_base 10: mod_base = OTHER; note = 2'-O-methyl-adenosine-3'-phosphate
  modified_base 11: mod_base = OTHER; note = 2'-O-methyl-guanosine-3'-phosphate
  modified_base 12: mod_base = OTHER; note = 2'-O-methyl-cytidine-3'-phosphate
  modified_base 13: mod_base = OTHER; note = 2'-O-methyl-uridine-3'-phosphate
  modified_base 14: mod_base = OTHER; note = 2'-O-methyl-guanosine-3'-phosphate
  modified_base 15: mod_base = OTHER; note = 2'-O-methyl-guanosine-3'-phosphate
  modified_base 16: mod_base = OTHER; note = 2'-O-methyl-adenosine-3'-phosphate
  modified_base 17: mod_base = OTHER; note = 2'-O-methyl-adenosine-3'-phosphate
  modified_base 18: mod_base = OTHER; note = 2'-O-methyl-adenosine-3'-phosphate
  modified_base 19: mod_base = OTHER; note = 2'-O-methyl-adenosine-3'-phosphate
tcatctacaagctggaaaa

SEQ ID NO: 1593 - RNA, 19 nt, synthetic construct
  source 1..19: mol_type = other RNA
  modified_base 1: mod_base = OTHER; note = 2'-O-methyl-uridine-3'-phosphorothioate
  modified_base 2: mod_base = OTHER; note = 2'-O-methyl-adenosine-3'-phosphorothioate
  modified_base 3: mod_base = OTHER; note = 2'-O-methyl-cytidine-3'-phosphate
  modified_base 4: mod_base = OTHER; note = 2'-O-methyl-adenosine-3'-phosphate
  modified_base 5: mod_base = OTHER; note = 2'-deoxy-2'-fluoro-cytidine-3'-phosphate
  modified_base 6: mod_base = OTHER; note = 2'-O-methyl-uridine-3'-phosphate
  modified_base 7: mod_base = OTHER; note = 2'-deoxy-2'-fluoro-guanosine-3'-phosphate
  modified_base 8: mod_base = OTHER; note = 2'-deoxy-2'-fluoro-uridine-3'-phosphate
  modified_base 9: mod_base = OTHER; note = 2'-deoxy-2'-fluoro-uridine-3'-phosphate
  modified_base 10: mod_base = OTHER; note = 2'-O-methyl-uridine-3'-phosphate
  modified_base 11: mod_base = OTHER; note = 2'-O-methyl-guanosine-3'-phosphate
  modified_base 12: mod_base = OTHER; note = 2'-O-methyl-uridine-3'-phosphate
  modified_base 13: mod_base = OTHER; note = 2'-O-methyl-uridine-3'-phosphate
  modified_base 14: mod_base = OTHER; note = 2'-O-methyl-adenosine-3'-phosphate
  modified_base 15: mod_base = OTHER; note = 2'-O-methyl-cytidine-3'-phosphate
  modified_base 16: mod_base = OTHER; note = 2'-O-methyl-adenosine-3'-phosphate
  modified_base 17: mod_base = OTHER; note = 2'-O-methyl-adenosine-3'-phosphate
  modified_base 18: mod_base = OTHER; note = 2'-O-methyl-uridine-3'-phosphate
  modified_base 19: mod_base = OTHER; note = 2'-O-methyl-adenosine-3'-phosphate
tacactgtttgttacaata

SEQ ID NO: 1594 - RNA, 19 nt, synthetic construct
  source 1..19: mol_type = other RNA
  modified_base 1: mod_base = OTHER; note = 2'-O-methyl-adenosine-3'-phosphorothioate
  modified_base 2: mod_base = OTHER; note = 2'-O-methyl-uridine-3'-phosphorothioate
  modified_base 3: mod_base = OTHER; note = 2'-O-methyl-cytidine-3'-phosphate
  modified_base 4: mod_base = OTHER; note = 2'-O-methyl-uridine-3'-phosphate
  modified_base 5: mod_base = OTHER; note = 2'-deoxy-2'-fluoro-uridine-3'-phosphate
  modified_base 6: mod_base = OTHER; note = 2'-O-methyl-adenosine-3'-phosphate
  modified_base 7: mod_base = OTHER; note = 2'-deoxy-2'-fluoro-uridine-3'-phosphate
  modified_base 8: mod_base = OTHER; note = 2'-deoxy-2'-fluoro-uridine-3'-phosphate
  modified_base 9: mod_base = OTHER; note = 2'-deoxy-2'-fluoro-cytidine-3'-phosphate
  modified_base 10: mod_base = OTHER; note = 2'-O-methyl-uridine-3'-phosphate
  modified_base 11: mod_base = OTHER; note = 2'-O-methyl-guanosine-3'-phosphate
  modified_base 12: mod_base = OTHER; note = 2'-O-methyl-uridine-3'-phosphate
  modified_base 13: mod_base = OTHER; note = 2'-O-methyl-guanosine-3'-phosphate
  modified_base 14: mod_base = OTHER; note = 2'-O-methyl-adenosine-3'-phosphate
  modified_base 15: mod_base = OTHER; note = 2'-O-methyl-guanosine-3'-phosphate
  modified_base 16: mod_base = OTHER; note = 2'-O-methyl-guanosine-3'-phosphate
  modified_base 17: mod_base = OTHER; note = 2'-O-methyl-adenosine-3'-phosphate
  modified_base 18: mod_base = OTHER; note = 2'-O-methyl-uridine-3'-phosphate
  modified_base 19: mod_base = OTHER; note = 2'-O-methyl-adenosine-3'-phosphate
atcttattctgtgaggata

SEQ ID NO: 1595 - RNA, 19 nt, synthetic construct
  source 1..19: mol_type = other RNA
  modified_base 1: mod_base = OTHER; note = 2'-O-methyl-adenosine-3'-phosphorothioate
  modified_base 2: mod_base = OTHER; note = 2'-O-methyl-uridine-3'-phosphorothioate
  modified_base 3: mod_base = OTHER; note = 2'-O-methyl-uridine-3'-phosphate
  modified_base 4: mod_base = OTHER; note = 2'-O-methyl-adenosine-3'-phosphate
  modified_base 5: mod_base = OTHER; note = 2'-deoxy-2'-fluoro-cytidine-3'-phosphate
  modified_base 6: mod_base = OTHER; note = 2'-O-methyl-adenosine-3'-phosphate
  modified_base 7: mod_base = OTHER; note = 2'-deoxy-2'-fluoro-guanosine-3'-phosphate
  modified_base 8: mod_base = OTHER; note = 2'-deoxy-2'-fluoro-adenosine-3'-phosphate
  modified_base 9: mod_base = OTHER; note = 2'-deoxy-2'-fluoro-adenosine-3'-phosphate
  modified_base 10: mod_base = OTHER; note = 2'-O-methyl-uridine-3'-phosphate
  modified_base 11: mod_base = OTHER; note = 2'-O-methyl-adenosine-3'-phosphate
  modified_base 12: mod_base = OTHER; note = 2'-O-methyl-cytidine-3'-phosphate
  modified_base 13: mod_base = OTHER; note = 2'-O-methyl-uridine-3'-phosphate
  modified_base 14: mod_base = OTHER; note = 2'-O-methyl-adenosine-3'-phosphate
  modified_base 15: mod_base = OTHER; note = 2'-O-methyl-uridine-3'-phosphate
  modified_base 16: mod_base = OTHER; note = 2'-O-methyl-adenosine-3'-phosphate
  modified_base 17: mod_base = OTHER; note = 2'-O-methyl-adenosine-3'-phosphate
  modified_base 18: mod_base = OTHER; note = 2'-O-methyl-cytidine-3'-phosphate
  modified_base 19: mod_base = OTHER; note = 2'-O-methyl-adenosine-3'-phosphate
attacagaatactataaca

SEQ ID NO: 1596 - RNA, 19 nt, synthetic construct
  source 1..19: mol_type = other RNA
  modified_base 1: mod_base = OTHER; note = 2'-O-methyl-adenosine-3'-phosphorothioate
  modified_base 2: mod_base = OTHER; note = 2'-O-methyl-cytidine-3'-phosphorothioate
  modified_base 3: mod_base = OTHER; note = 2'-O-methyl-adenosine-3'-phosphate
  modified_base 4: mod_base = OTHER; note = 2'-O-methyl-guanosine-3'-phosphate
  modified_base 5: mod_base = OTHER; note = 2'-deoxy-2'-fluoro-adenosine-3'-phosphate
  modified_base 6: mod_base = OTHER; note = 2'-O-methyl-adenosine-3'-phosphate
  modified_base 7: mod_base = OTHER; note = 2'-deoxy-2'-fluoro-uridine-3'-phosphate
  modified_base 8: mod_base = OTHER; note = 2'-deoxy-2'-fluoro-adenosine-3'-phosphate
  modified_base 9: mod_base = OTHER; note = 2'-deoxy-2'-fluoro-cytidine-3'-phosphate
  modified_base 10: mod_base = OTHER; note = 2'-O-methyl-uridine-3'-phosphate
  modified_base 11: mod_base = OTHER; note = 2'-O-methyl-adenosine-3'-phosphate
  modified_base 12: mod_base = OTHER; note = 2'-O-methyl-uridine-3'-phosphate
  modified_base 13: mod_base = OTHER; note = 2'-O-methyl-adenosine-3'-phosphate
  modified_base 14: mod_base = OTHER; note = 2'-O-methyl-adenosine-3'-phosphate
  modified_base 15: mod_base = OTHER; note = 2'-O-methyl-cytidine-3'-phosphate
  modified_base 16: mod_base = OTHER; note = 2'-O-methyl-uridine-3'-phosphate
  modified_base 17: mod_base = OTHER; note = 2'-O-methyl-cytidine-3'-phosphate
  modified_base 18: mod_base = OTHER; note = 2'-O-methyl-adenosine-3'-phosphate
  modified_base 19: mod_base = OTHER; note = 2'-O-methyl-adenosine-3'-phosphate
acagaatactataactcaa

SEQ ID NO: 1597 - RNA, 19 nt, synthetic construct
  source 1..19: mol_type = other RNA
  modified_base 1: mod_base = OTHER; note = 2'-O-methyl-adenosine-3'-phosphorothioate
  modified_base 2: mod_base = OTHER; note = 2'-O-methyl-adenosine-3'-phosphorothioate
  modified_base 3: mod_base = OTHER; note = 2'-O-methyl-adenosine-3'-phosphate
  modified_base 4: mod_base = OTHER; note = 2'-O-methyl-uridine-3'-phosphate
  modified_base 5: mod_base = OTHER; note = 2'-deoxy-2'-fluoro-cytidine-3'-phosphate
  modified_base 6: mod_base = OTHER; note = 2'-O-methyl-adenosine-3'-phosphate
  modified_base 7: mod_base = OTHER; note = 2'-deoxy-2'-fluoro-guanosine-3'-phosphate
  modified_base 8: mod_base = OTHER; note = 2'-deoxy-2'-fluoro-adenosine-3'-phosphate
  modified_base 9: mod_base = OTHER; note = 2'-deoxy-2'-fluoro-adenosine-3'-phosphate
  modified_base 10: mod_base = OTHER; note = 2'-O-methyl-uridine-3'-phosphate
  modified_base 11: mod_base = OTHER; note = 2'-O-methyl-cytidine-3'-phosphate
  modified_base 12: mod_base = OTHER; note = 2'-O-methyl-adenosine-3'-phosphate
  modified_base 13: mod_base = OTHER; note = 2'-O-methyl-cytidine-3'-phosphate
  modified_base 14: mod_base = OTHER; note = 2'-O-methyl-uridine-3'-phosphate
  modified_base 15: mod_base = OTHER; note = 2'-O-methyl-adenosine-3'-phosphate
  modified_base 16: mod_base = OTHER; note = 2'-O-methyl-uridine-3'-phosphate
  modified_base 17: mod_base = OTHER; note = 2'-O-methyl-adenosine-3'-phosphate
  modified_base 18: mod_base = OTHER; note = 2'-O-methyl-uridine-3'-phosphate
  modified_base 19: mod_base = OTHER; note = 2'-O-methyl-adenosine-3'-phosphate
aaatcagaatcactatata

SEQ ID NO: 1598 - RNA, 19 nt, synthetic construct
  source 1..19: mol_type = other RNA
  modified_base 1: mod_base = OTHER; note = 2'-O-methyl-adenosine-3'-phosphorothioate
  modified_base 2: mod_base = OTHER; note = 2'-O-methyl-guanosine-3'-phosphorothioate
  modified_base 3: mod_base = OTHER; note = 2'-O-methyl-uridine-3'-phosphate
  modified_base 4: mod_base = OTHER; note = 2'-O-methyl-cytidine-3'-phosphate
  modified_base 5: mod_base = OTHER; note = 2'-deoxy-2'-fluoro-adenosine-3'-phosphate
  modified_base 6: mod_base = OTHER; note = 2'-O-methyl-guanosine-3'-phosphate
  modified_base 7: mod_base = OTHER; note = 2'-deoxy-2'-fluoro-adenosine-3'-phosphate
  modified_base 8: mod_base = OTHER; note = 2'-deoxy-2'-fluoro-adenosine-3'-phosphate
  modified_base 9: mod_base = OTHER; note = 2'-deoxy-2'-fluoro-adenosine-3'-phosphate
  modified_base 10: mod_base = OTHER; note = 2'-O-methyl-adenosine-3'-phosphate
  modified_base 11: mod_base = OTHER; note = 2'-O-methyl-cytidine-3'-phosphate
  modified_base 12: mod_base = OTHER; note = 2'-O-methyl-uridine-3'-phosphate
  modified_base 13: mod_base = OTHER; note = 2'-O-methyl-cytidine-3'-phosphate
  modified_base 14: mod_base = OTHER; note = 2'-O-methyl-cytidine-3'-phosphate
  modified_base 15: mod_base = OTHER; note = 2'-O-methyl-cytidine-3'-phosphate
  modified_base 16: mod_base = OTHER; note = 2'-O-methyl-cytidine-3'-phosphate
  modified_base 17: mod_base = OTHER; note = 2'-O-methyl-adenosine-3'-phosphate
  modified_base 18: mod_base = OTHER; note = 2'-O-methyl-guanosine-3'-phosphate
  modified_base 19: mod_base = OTHER; note = 2'-O-methyl-adenosine-3'-phosphate
agtcagaaaactccccaga

SEQ ID NO: 1599 - RNA, 19 nt, synthetic construct
  source 1..19: mol_type = other RNA
  modified_base 1: mod_base = OTHER; note = 2'-O-methyl-guanosine-3'-phosphorothioate
  modified_base 2: mod_base = OTHER; note = 2'-O-methyl-uridine-3'-phosphorothioate
  modified_base 3: mod_base = OTHER; note = 2'-O-methyl-cytidine-3'-phosphate
  modified_base 4: mod_base = OTHER; note = 2'-O-methyl-adenosine-3'-phosphate
  modified_base 5: mod_base = OTHER; note = 2'-deoxy-2'-fluoro-guanosine-3'-phosphate
  modified_base 6: mod_base = OTHER; note = 2'-O-methyl-adenosine-3'-phosphate
  modified_base 7: mod_base = OTHER; note = 2'-deoxy-2'-fluoro-adenosine-3'-phosphate
  modified_base 8: mod_base = OTHER; note = 2'-deoxy-2'-fluoro-adenosine-3'-phosphate
  modified_base 9: mod_base = OTHER; note = 2'-deoxy-2'-fluoro-adenosine-3'-phosphate
  modified_base 10: mod_base = OTHER; note = 2'-O-methyl-cytidine-3'-phosphate
  modified_base 11: mod_base = OTHER; note = 2'-O-methyl-uridine-3'-phosphate
  modified_base 12: mod_base = OTHER; note = 2'-O-methyl-cytidine-3'-phosphate
  modified_base 13: mod_base = OTHER; note = 2'-O-methyl-cytidine-3'-phosphate
  modified_base 14: mod_base = OTHER; note = 2'-O-methyl-cytidine-3'-phosphate
  modified_base 15: mod_base = OTHER; note = 2'-O-methyl-cytidine-3'-phosphate
  modified_base 16: mod_base = OTHER; note = 2'-O-methyl-adenosine-3'-phosphate
  modified_base 17: mod_base = OTHER; note = 2'-O-methyl-guanosine-3'-phosphate
  modified_base 18: mod_base = OTHER; note = 2'-O-methyl-cytidine-3'-phosphate
  modified_base 19: mod_base = OTHER; note = 2'-O-methyl-adenosine-3'-phosphate
gtcagaaaactccccagca

SEQ ID NO: 1600 - RNA, 19 nt, synthetic construct
  source 1..19: mol_type = other RNA
  modified_base 1: mod_base = OTHER; note = 2'-O-methyl-uridine-3'-phosphorothioate
  modified_base 2: mod_base = OTHER; note = 2'-O-methyl-cytidine-3'-phosphorothioate
  modified_base 3: mod_base = OTHER; note = 2'-O-methyl-adenosine-3'-phosphate
  modified_base 4: mod_base = OTHER; note = 2'-O-methyl-guanosine-3'-phosphate
  modified_base 5: mod_base = OTHER; note = 2'-deoxy-2'-fluoro-adenosine-3'-phosphate
  modified_base 6: mod_base = OTHER; note = 2'-O-methyl-adenosine-3'-phosphate
  modified_base 7: mod_base = OTHER; note = 2'-deoxy-2'-fluoro-adenosine-3'-phosphate
  modified_base 8: mod_base = OTHER; note = 2'-deoxy-2'-fluoro-adenosine-3'-phosphate
  modified_base 9: mod_base = OTHER; note = 2'-deoxy-2'-fluoro-cytidine-3'-phosphate
  modified_base 10: mod_base = OTHER; note = 2'-O-methyl-uridine-3'-phosphate
  modified_base 11: mod_base = OTHER; note = 2'-O-methyl-cytidine-3'-phosphate
  modified_base 12: mod_base = OTHER; note = 2'-O-methyl-cytidine-3'-phosphate
  modified_base 13: mod_base = OTHER; note = 2'-O-methyl-cytidine-3'-phosphate
  modified_base 14: mod_base = OTHER; note = 2'-O-methyl-cytidine-3'-phosphate
  modified_base 15: mod_base = OTHER; note = 2'-O-methyl-adenosine-3'-phosphate
  modified_base 16: mod_base = OTHER; note = 2'-O-methyl-guanosine-3'-phosphate
  modified_base 17: mod_base = OTHER; note = 2'-O-methyl-cytidine-3'-phosphate
  modified_base 18: mod_base = OTHER; note = 2'-O-methyl-uridine-3'-phosphate
  modified_base 19: mod_base = OTHER; note = 2'-O-methyl-adenosine-3'-phosphate
tcagaaaactccccagcta

SEQ ID NO: 1601 - RNA, 19 nt, synthetic construct
  source 1..19: mol_type = other RNA
  modified_base 1: mod_base = OTHER; note = 2'-O-methyl-cytidine-3'-phosphorothioate
  modified_base 2: mod_base = OTHER; note = 2'-O-methyl-adenosine-3'-phosphorothioate
  modified_base 3: mod_base = OTHER; note = 2'-O-methyl-guanosine-3'-phosphate
  modified_base 4: mod_base = OTHER; note = 2'-O-methyl-adenosine-3'-phosphate
  modified_base 5: mod_base = OTHER; note = 2'-deoxy-2'-fluoro-adenosine-3'-phosphate
  modified_base 6: mod_base = OTHER; note = 2'-O-methyl-adenosine-3'-phosphate
  modified_base 7: mod_base = OTHER; note = 2'-deoxy-2'-fluoro-adenosine-3'-phosphate
  modified_base 8: mod_base = OTHER; note = 2'-deoxy-2'-fluoro-cytidine-3'-phosphate
  modified_base 9: mod_base = OTHER; note = 2'-deoxy-2'-fluoro-uridine-3'-phosphate
  modified_base 10: mod_base = OTHER; note = 2'-O-methyl-cytidine-3'-phosphate
  modified_base 11: mod_base = OTHER; note = 2'-O-methyl-cytidine-3'-phosphate
  modified_base 12: mod_base = OTHER; note = 2'-O-methyl-cytidine-3'-phosphate
  modified_base 13: mod_base = OTHER; note = 2'-O-methyl-cytidine-3'-phosphate
  modified_base 14: mod_base = OTHER; note = 2'-O-methyl-adenosine-3'-phosphate
  modified_base 15: mod_base = OTHER; note = 2'-O-methyl-guanosine-3'-phosphate
  modified_base 16: mod_base = OTHER; note = 2'-O-methyl-cytidine-3'-phosphate
  modified_base 17: mod_base = OTHER; note = 2'-O-methyl-uridine-3'-phosphate
  modified_base 18: mod_base = OTHER; note = 2'-O-methyl-adenosine-3'-phosphate
  modified_base 19: mod_base = OTHER; note = 2'-O-methyl-adenosine-3'-phosphate
cagaaaactccccagctaa

SEQ ID NO: 1602 - RNA, 19 nt, synthetic construct
  source 1..19: mol_type = other RNA
  modified_base 1: mod_base = OTHER; note = 2'-O-methyl-adenosine-3'-phosphorothioate
  modified_base 2: mod_base = OTHER; note = 2'-O-methyl-guanosine-3'-phosphorothioate
  modified_base 3: mod_base = OTHER; note = 2'-O-methyl-adenosine-3'-phosphate
  modified_base 4: mod_base = OTHER; note = 2'-O-methyl-adenosine-3'-phosphate
  modified_base 5: mod_base = OTHER; note = 2'-deoxy-2'-fluoro-adenosine-3'-phosphate
  modified_base 6: mod_base = OTHER; note = 2'-O-methyl-adenosine-3'-phosphate
  modified_base 7: mod_base = OTHER; note = 2'-deoxy-2'-fluoro-cytidine-3'-phosphate
  modified_base 8: mod_base = OTHER; note = 2'-deoxy-2'-fluoro-uridine-3'-phosphate
  modified_base 9: mod_base = OTHER; note = 2'-deoxy-2'-fluoro-cytidine-3'-phosphate
  modified_base 10: mod_base = OTHER; note = 2'-O-methyl-cytidine-3'-phosphate
  modified_base 11: mod_base = OTHER; note = 2'-O-methyl-cytidine-3'-phosphate
  modified_base 12: mod_base = OTHER; note = 2'-O-methyl-cytidine-3'-phosphate
  modified_base 13: mod_base = OTHER; note = 2'-O-methyl-adenosine-3'-phosphate
  modified_base 14: mod_base = OTHER; note = 2'-O-methyl-guanosine-3'-phosphate
  modified_base 15: mod_base = OTHER; note = 2'-O-methyl-cytidine-3'-phosphate
  modified_base 16: mod_base = OTHER; note = 2'-O-methyl-uridine-3'-phosphate
  modified_base 17: mod_base = OTHER; note = 2'-O-methyl-adenosine-3'-phosphate
  modified_base 18: mod_base = OTHER; note = 2'-O-methyl-adenosine-3'-phosphate
  modified_base 19: mod_base = OTHER; note = 2'-O-methyl-adenosine-3'-phosphate
agaaaactccccagctaaa

SEQ ID NO: 1603 - RNA, 19 nt, synthetic construct
  source 1..19: mol_type = other RNA
  modified_base 1: mod_base = OTHER; note = 2'-O-methyl-guanosine-3'-phosphorothioate
  modified_base 2: mod_base = OTHER; note = 2'-O-methyl-uridine-3'-phosphorothioate
  modified_base 3: mod_base = OTHER; note = 2'-O-methyl-adenosine-3'-phosphate
  modified_base 4: mod_base = OTHER; note = 2'-O-methyl-adenosine-3'-phosphate
  modified_base 5: mod_base = OTHER; note = 2'-deoxy-2'-fluoro-guanosine-3'-phosphate
  modified_base 6: mod_base = OTHER; note = 2'-O-methyl-adenosine-3'-phosphate
  modified_base 7: mod_base = OTHER; note = 2'-deoxy-2'-fluoro-cytidine-3'-phosphate
  modified_base 8: mod_base = OTHER; note = 2'-deoxy-2'-fluoro-uridine-3'-phosphate
  modified_base 9: mod_base = OTHER; note = 2'-deoxy-2'-fluoro-uridine-3'-phosphate
  modified_base 10: mod_base = OTHER; note = 2'-O-methyl-cytidine-3'-phosphate
  modified_base 11: mod_base = OTHER; note = 2'-O-methyl-adenosine-3'-phosphate
  modified_base 12: mod_base = OTHER; note = 2'-O-methyl-uridine-3'-phosphate
  modified_base 13: mod_base = OTHER; note = 2'-O-methyl-adenosine-3'-phosphate
  modified_base 14: mod_base = OTHER; note = 2'-O-methyl-cytidine-3'-phosphate
  modified_base 15: mod_base = OTHER; note = 2'-O-methyl-adenosine-3'-phosphate
  modified_base 16: mod_base = OTHER; note = 2'-O-methyl-adenosine-3'-phosphate
  modified_base 17: mod_base = OTHER; note = 2'-O-methyl-cytidine-3'-phosphate
  modified_base 18: mod_base = OTHER; note = 2'-O-methyl-adenosine-3'-phosphate
  modified_base 19: mod_base = OTHER; note = 2'-O-methyl-adenosine-3'-phosphate
gtaagacttcatacaacaa

SEQ ID NO: 1604 - RNA, 19 nt, synthetic construct
  source 1..19: mol_type = other RNA
  modified_base 1: mod_base = OTHER; note = 2'-O-methyl-adenosine-3'-phosphorothioate
  modified_base 2: mod_base = OTHER; note = 2'-O-methyl-adenosine-3'-phosphorothioate
  modified_base 3: mod_base = OTHER; note = 2'-O-methyl-guanosine-3'-phosphate
  modified_base 4: mod_base = OTHER; note = 2'-O-methyl-adenosine-3'-phosphate
  modified_base 5: mod_base = OTHER; note = 2'-deoxy-2'-fluoro-cytidine-3'-phosphate
  modified_base 6: mod_base = OTHER; note = 2'-O-methyl-uridine-3'-phosphate
  modified_base 7: mod_base = OTHER; note = 2'-deoxy-2'-fluoro-uridine-3'-phosphate
  modified_base 8: mod_base = OTHER; note = 2'-deoxy-2'-fluoro-cytidine-3'-phosphate
  modified_base 9: mod_base = OTHER; note = 2'-deoxy-2'-fluoro-adenosine-3'-phosphate
  modified_base 10: mod_base = OTHER; note = 2'-O-methyl-uridine-3'-phosphate
  modified_base 11: mod_base = OTHER; note = 2'-O-methyl-adenosine-3'-phosphate
  modified_base 12: mod_base = OTHER; note = 2'-O-methyl-cytidine-3'-phosphate
  modified_base 13: mod_base = OTHER; note = 2'-O-methyl-adenosine-3'-phosphate
  modified_base 14: mod_base = OTHER; note = 2'-O-methyl-adenosine-3'-phosphate
  modified_base 15: mod_base = OTHER; note = 2'-O-methyl-cytidine-3'-phosphate
  modified_base 16: mod_base = OTHER; note = 2'-O-methyl-adenosine-3'-phosphate
  modified_base 17: mod_base = OTHER; note = 2'-O-methyl-cytidine-3'-phosphate
  modified_base 18: mod_base = OTHER; note = 2'-O-methyl-adenosine-3'-phosphate
  modified_base 19: mod_base = OTHER; note = 2'-O-methyl-adenosine-3'-phosphate
aagacttcatacaacacaa

SEQ ID NO: 1605 - RNA, 19 nt, synthetic construct
  source 1..19: mol_type = other RNA
  modified_base 1: mod_base = OTHER; note = 2'-O-methyl-adenosine-3'-phosphorothioate
  modified_base 2: mod_base = OTHER; note = 2'-O-methyl-guanosine-3'-phosphorothioate
  modified_base 3: mod_base = OTHER; note = 2'-O-methyl-adenosine-3'-phosphate
  modified_base 4: mod_base = OTHER; note = 2'-O-methyl-cytidine-3'-phosphate
  modified_base 5: mod_base = OTHER; note = 2'-deoxy-2'-fluoro-uridine-3'-phosphate
  modified_base 6: mod_base = OTHER; note = 2'-O-methyl-uridine-3'-phosphate
  modified_base 7: mod_base = OTHER; note = 2'-deoxy-2'-fluoro-cytidine-3'-phosphate
  modified_base 8: mod_base = OTHER; note = 2'-deoxy-2'-fluoro-adenosine-3'-phosphate
  modified_base 9: mod_base = OTHER; note = 2'-deoxy-2'-fluoro-uridine-3'-phosphate
  modified_base 10: mod_base = OTHER; note = 2'-O-methyl-adenosine-3'-phosphate
  modified_base 11: mod_base = OTHER; note = 2'-O-methyl-cytidine-3'-phosphate
  modified_base 12: mod_base = OTHER; note = 2'-O-methyl-adenosine-3'-phosphate
  modified_base 13: mod_base = OTHER; note = 2'-O-methyl-adenosine-3'-phosphate
  modified_base 14: mod_base = OTHER; note = 2'-O-methyl-cytidine-3'-phosphate
  modified_base 15: mod_base = OTHER; note = 2'-O-methyl-adenosine-3'-phosphate
  modified_base 16: mod_base = OTHER; note = 2'-O-methyl-cytidine-3'-phosphate
  modified_base 17: mod_base = OTHER; note = 2'-O-methyl-adenosine-3'-phosphate
  modified_base 18: mod_base = OTHER; note = 2'-O-methyl-adenosine-3'-phosphate
  modified_base 19: mod_base = OTHER; note = 2'-O-methyl-adenosine-3'-phosphate
agacttcatacaacacaaa

SEQ ID NO: 1606 - RNA, 19 nt, synthetic construct
  source 1..19: mol_type = other RNA
  modified_base 1: mod_base = OTHER; note = 2'-O-methyl-uridine-3'-phosphorothioate
  modified_base 2: mod_base = OTHER; note = 2'-O-methyl-guanosine-3'-phosphorothioate
  modified_base 3: mod_base = OTHER; note = 2'-O-methyl-cytidine-3'-phosphate
  modified_base 4: mod_base = OTHER; note = 2'-O-methyl-cytidine-3'-phosphate
  modified_base 5: mod_base = OTHER; note = 2'-deoxy-2'-fluoro-adenosine-3'-phosphate
  modified_base 6: mod_base = OTHER; note = 2'-O-methyl-adenosine-3'-phosphate
  modified_base 7: mod_base = OTHER; note = 2'-deoxy-2'-fluoro-guanosine-3'-phosphate
  modified_base 8: mod_base = OTHER; note = 2'-deoxy-2'-fluoro-guanosine-3'-phosphate
  modified_base 9: mod_base = OTHER; note = 2'-deoxy-2'-fluoro-cytidine-3'-phosphate
  modified_base 10: mod_base = OTHER; note = 2'-O-methyl-uridine-3'-phosphate
  modified_base 11: mod_base = OTHER; note = 2'-O-methyl-adenosine-3'-phosphate
  modified_base 12: mod_base = OTHER; note = 2'-O-methyl-cytidine-3'-phosphate
  modified_base 13: mod_base = OTHER; note = 2'-O-methyl-cytidine-3'-phosphate
  modified_base 14: mod_base = OTHER; note = 2'-O-methyl-uridine-3'-phosphate
  modified_base 15: mod_base = OTHER; note = 2'-O-methyl-adenosine-3'-phosphate
  modified_base 16: mod_base = OTHER; note = 2'-O-methyl-adenosine-3'-phosphate
  modified_base 17: mod_base = OTHER; note = 2'-O-methyl-adenosine-3'-phosphate
  modified_base 18: mod_base = OTHER; note = 2'-O-methyl-adenosine-3'-phosphate
  modified_base 19: mod_base = OTHER; note = 2'-O-methyl-adenosine-3'-phosphate
tgccaaggctacctaaaaa

SEQ ID NO: 1607 - RNA, 19 nt, synthetic construct
  source 1..19: mol_type = other RNA
  modified_base 1: mod_base = OTHER; note = 2'-O-methyl-cytidine-3'-phosphorothioate
  modified_base 2: mod_base = OTHER; note = 2'-O-methyl-adenosine-3'-phosphorothioate
  modified_base 3: mod_base = OTHER; note = 2'-O-methyl-adenosine-3'-phosphate
  modified_base 4: mod_base = OTHER; note = 2'-O-methyl-guanosine-3'-phosphate
  modified_base 5: mod_base = OTHER; note = 2'-deoxy-2'-fluoro-guanosine-3'-phosphate
  modified_base 6: mod_base = OTHER; note = 2'-O-methyl-cytidine-3'-phosphate
  modified_base 7: mod_base = OTHER; note = 2'-deoxy-2'-fluoro-uridine-3'-phosphate
  modified_base 8: mod_base = OTHER; note = 2'-deoxy-2'-fluoro-adenosine-3'-phosphate
  modified_base 9: mod_base = OTHER; note = 2'-deoxy-2'-fluoro-cytidine-3'-phosphate
  modified_base 10: mod_base = OTHER; note = 2'-O-methyl-cytidine-3'-phosphate
  modified_base 11: mod_base = OTHER; note = 2'-O-methyl-uridine-3'-phosphate
  modified_base 12: mod_base = OTHER; note = 2'-O-methyl-adenosine-3'-phosphate
  modified_base 13: mod_base = OTHER; note = 2'-O-methyl-adenosine-3'-phosphate
  modified_base 14: mod_base = OTHER; note = 2'-O-methyl-adenosine-3'-phosphate
  modified_base 15: mod_base = OTHER; note = 2'-O-methyl-adenosine-3'-phosphate
  modified_base 16: mod_base = OTHER; note = 2'-O-methyl-guanosine-3'-phosphate
  modified_base 17: mod_base = OTHER; note = 2'-O-methyl-adenosine-3'-phosphate
  modified_base 18: mod_base = OTHER; note = 2'-O-methyl-adenosine-3'-phosphate
  modified_base 19: mod_base = OTHER; note = 2'-O-methyl-adenosine-3'-phosphate
caaggctacctaaaagaaa

SEQ ID NO: 1608 - RNA, 19 nt, synthetic construct
  source 1..19: mol_type = other RNA
  modified_base 1: mod_base = OTHER; note = 2'-O-methyl-adenosine-3'-phosphorothioate
  modified_base 2: mod_base = OTHER; note = 2'-O-methyl-adenosine-3'-phosphorothioate
  modified_base 3: mod_base = OTHER; note = 2'-O-methyl-guanosine-3'-phosphate
  modified_base 4: mod_base = OTHER; note = 2'-O-methyl-guanosine-3'-phosphate
  modified_base 5: mod_base = OTHER; note = 2'-deoxy-2'-fluoro-cytidine-3'-phosphate
  modified_base 6: mod_base = OTHER; note = 2'-O-methyl-uridine-3'-phosphate
  modified_base 7: mod_base = OTHER; note = 2'-deoxy-2'-fluoro-adenosine-3'-phosphate
  modified_base 8: mod_base = OTHER; note = 2'-deoxy-2'-fluoro-cytidine-3'-phosphate
  modified_base 9: mod_base = OTHER; note = 2'-deoxy-2'-fluoro-cytidine-3'-phosphate
  modified_base 10: mod_base = OTHER; note = 2'-O-methyl-uridine-3'-phosphate
  modified_base 11: mod_base = OTHER; note = 2'-O-methyl-adenosine-3'-phosphate
  modified_base 12: mod_base = OTHER; note = 2'-O-methyl-adenosine-3'-phosphate
  modified_base 13: mod_base = OTHER; note = 2'-O-methyl-adenosine-3'-phosphate
  modified_base 14: mod_base = OTHER; note = 2'-O-methyl-adenosine-3'-phosphate
  modified_base 15: mod_base = OTHER; note = 2'-O-methyl-guanosine-3'-phosphate
  modified_base 16: mod_base = OTHER; note = 2'-O-methyl-adenosine-3'-phosphate
  modified_base 17: mod_base = OTHER; note = 2'-O-methyl-adenosine-3'-phosphate
  modified_base 18: mod_base = OTHER; note = 2'-O-methyl-guanosine-3'-phosphate
  modified_base 19: mod_base = OTHER; note = 2'-O-methyl-adenosine-3'-phosphate
aaggctacctaaaagaaga

SEQ ID NO: 1609 - RNA, 19 nt, synthetic construct
  source 1..19: mol_type = other RNA
  modified_base 1: mod_base = OTHER; note = 2'-O-methyl-adenosine-3'-phosphorothioate
  modified_base 2: mod_base = OTHER; note = 2'-O-methyl-guanosine-3'-phosphorothioate
  modified_base 3: mod_base = OTHER; note = 2'-O-methyl-guanosine-3'-phosphate
  modified_base 4: mod_base = OTHER; note = 2'-O-methyl-cytidine-3'-phosphate
  modified_base 5: mod_base = OTHER; note = 2'-deoxy-2'-fluoro-uridine-3'-phosphate
  modified_base 6: mod_base = OTHER; note = 2'-O-methyl-adenosine-3'-phosphate
  modified_base 7: mod_base = OTHER; note = 2'-deoxy-2'-fluoro-cytidine-3'-phosphate
  modified_base 8: mod_base = OTHER; note = 2'-deoxy-2'-fluoro-cytidine-3'-phosphate
  modified_base 9: mod_base = OTHER; note = 2'-deoxy-2'-fluoro-uridine-3'-phosphate
  modified_base 10: mod_base = OTHER; note = 2'-O-methyl-adenosine-3'-phosphate
  modified_base 11: mod_base = OTHER; note = 2'-O-methyl-adenosine-3'-phosphate
  modified_base 12: mod_base = OTHER; note = 2'-O-methyl-adenosine-3'-phosphate
  modified_base 13: mod_base = OTHER; note = 2'-O-methyl-adenosine-3'-phosphate
  modified_base 14: mod_base = OTHER; note = 2'-O-methyl-guanosine-3'-phosphate
  modified_base 15: mod_base = OTHER; note = 2'-O-methyl-adenosine-3'-phosphate
  modified_base 16: mod_base = OTHER; note = 2'-O-methyl-adenosine-3'-phosphate
  modified_base 17: mod_base = OTHER; note = 2'-O-methyl-guanosine-3'-phosphate
  modified_base 18: mod_base = OTHER; note = 2'-O-methyl-adenosine-3'-phosphate
  modified_base 19: mod_base = OTHER; note = 2'-O-methyl-adenosine-3'-phosphate
aggctacctaaaagaagaa

SEQ ID NO: 1610 - RNA, 19 nt, synthetic construct
  source 1..19: mol_type = other RNA
  modified_base 1: mod_base = OTHER; note = 2'-O-methyl-guanosine-3'-phosphorothioate
  modified_base 2: mod_base = OTHER; note = 2'-O-methyl-guanosine-3'-phosphorothioate
  modified_base 3: mod_base = OTHER; note = 2'-O-methyl-cytidine-3'-phosphate
  modified_base 4: mod_base = OTHER; note = 2'-O-methyl-uridine-3'-phosphate
  modified_base 5: mod_base = OTHER; note = 2'-deoxy-2'-fluoro-adenosine-3'-phosphate
  modified_base 6: mod_base = OTHER; note = 2'-O-methyl-cytidine-3'-phosphate
  modified_base 7: mod_base = OTHER; note = 2'-deoxy-2'-fluoro-cytidine-3'-phosphate
  modified_base 8: mod_base = OTHER; note = 2'-deoxy-2'-fluoro-uridine-3'-phosphate
  modified_base 9: mod_base = OTHER; note = 2'-deoxy-2'-fluoro-adenosine-3'-phosphate
  modified_base 10: mod_base = OTHER; note = 2'-O-methyl-adenosine-3'-phosphate
  modified_base 11: mod_base = OTHER; note = 2'-O-methyl-adenosine-3'-phosphate
  modified_base 12: mod_base = OTHER; note = 2'-O-methyl-adenosine-3'-phosphate
  modified_base 13: mod_base = OTHER; note = 2'-O-methyl-guanosine-3'-phosphate
  modified_base 14: mod_base = OTHER; note = 2'-O-methyl-adenosine-3'-phosphate
  modified_base 15: mod_base = OTHER; note = 2'-O-methyl-adenosine-3'-phosphate
  modified_base 16: mod_base = OTHER; note = 2'-O-methyl-guanosine-3'-phosphate
  modified_base 17: mod_base = OTHER; note = 2'-O-methyl-adenosine-3'-phosphate
  modified_base 18: mod_base = OTHER; note = 2'-O-methyl-cytidine-3'-phosphate
  modified_base 19: mod_base = OTHER; note = 2'-O-methyl-adenosine-3'-phosphate
ggctacctaaaagaagaca

SEQ ID NO: 1611 - RNA, 19 nt, synthetic construct
  source 1..19: mol_type = other RNA
  modified_base 1: mod_base = OTHER; note = 2'-O-methyl-guanosine-3'-phosphorothioate
  modified_base 2: mod_base = OTHER; note = 2'-O-methyl-cytidine-3'-phosphorothioate
  modified_base 3: mod_base = OTHER; note = 2'-O-methyl-uridine-3'-phosphate
  modified_base 4: mod_base = OTHER; note = 2'-O-methyl-adenosine-3'-phosphate
  modified_base 5: mod_base = OTHER; note = 2'-deoxy-2'-fluoro-cytidine-3'-phosphate
  modified_base 6: mod_base = OTHER; note = 2'-O-methyl-cytidine-3'-phosphate
  modified_base 7: mod_base = OTHER; note = 2'-deoxy-2'-fluoro-uridine-3'-phosphate
  modified_base 8: mod_base = OTHER; note = 2'-deoxy-2'-fluoro-adenosine-3'-phosphate
  modified_base 9: mod_base = OTHER; note = 2'-deoxy-2'-fluoro-adenosine-3'-phosphate
  modified_base 10: mod_base = OTHER; note = 2'-O-methyl-adenosine-3'-phosphate
  modified_base 11: mod_base = OTHER; note = 2'-O-methyl-adenosine-3'-phosphate
  modified_base 12: mod_base = OTHER; note = 2'-O-methyl-guanosine-3'-phosphate
  modified_base 13: mod_base = OTHER; note = 2'-O-methyl-adenosine-3'-phosphate
  modified_base 14: mod_base = OTHER; note = 2'-O-methyl-adenosine-3'-phosphate
  modified_base 15: mod_base = OTHER; note = 2'-O-methyl-guanosine-3'-phosphate
  modified_base 16: mod_base = OTHER; note = 2'-O-methyl-adenosine-3'-phosphate
  modified_base 17: mod_base = OTHER; note = 2'-O-methyl-cytidine-3'-phosphate
  modified_base 18: mod_base = OTHER; note = 2'-O-methyl-adenosine-3'-phosphate
  modified_base 19: mod_base = OTHER; note = 2'-O-methyl-adenosine-3'-phosphate
gctacctaaaagaagacaa

SEQ ID NO: 1612 - RNA, 19 nt, synthetic construct
  source 1..19: mol_type = other RNA
  modified_base 1: mod_base = OTHER; note = 2'-O-methyl-cytidine-3'-phosphorothioate
  modified_base 2: mod_base = OTHER; note = 2'-O-methyl-uridine-3'-phosphorothioate
  modified_base 3: mod_base = OTHER; note = 2'-O-methyl-adenosine-3'-phosphate
  modified_base 4: mod_base = OTHER; note = 2'-O-methyl-cytidine-3'-phosphate
  modified_base 5: mod_base = OTHER; note = 2'-deoxy-2'-fluoro-cytidine-3'-phosphate
  modified_base 6: mod_base = OTHER; note = 2'-O-methyl-uridine-3'-phosphate
  modified_base 7: mod_base = OTHER; note = 2'-deoxy-2'-fluoro-adenosine-3'-phosphate
  modified_base 8: mod_base = OTHER; note = 2'-deoxy-2'-fluoro-adenosine-3'-phosphate
  modified_base 9: mod_base = OTHER; note = 2'-deoxy-2'-fluoro-adenosine-3'-phosphate
  modified_base 10: mod_base = OTHER; note = 2'-O-methyl-adenosine-3'-phosphate
  modified_base 11: mod_base = OTHER; note = 2'-O-methyl-guanosine-3'-phosphate
  modified_base 12: mod_base = OTHER; note = 2'-O-methyl-adenosine-3'-phosphate
  modified_base 13: mod_base = OTHER; note = 2'-O-methyl-adenosine-3'-phosphate
  modified_base 14: mod_base = OTHER; note = 2'-O-methyl-guanosine-3'-phosphate
  modified_base 15: mod_base = OTHER; note = 2'-O-methyl-adenosine-3'-phosphate
  modified_base 16: mod_base = OTHER; note = 2'-O-methyl-cytidine-3'-phosphate
  modified_base 17: mod_base = OTHER; note = 2'-O-methyl-adenosine-3'-phosphate
  modified_base 18: mod_base = OTHER; note = 2'-O-methyl-guanosine-3'-phosphate
  modified_base 19: mod_base = OTHER; note = 2'-O-methyl-adenosine-3'-phosphate
ctacctaaaagaagacaga

SEQ ID NO: 1613 - RNA, 19 nt, synthetic construct
  source 1..19: mol_type = other RNA
  modified_base 1: mod_base = OTHER; note = 2'-O-methyl-uridine-3'-phosphorothioate
  modified_base 2: mod_base = OTHER; note = 2'-O-methyl-adenosine-3'-phosphorothioate
  modified_base 3: mod_base = OTHER; note = 2'-O-methyl-cytidine-3'-phosphate
  modified_base 4: mod_base = OTHER; note = 2'-O-methyl-cytidine-3'-phosphate
  modified_base 5: mod_base = OTHER; note = 2'-deoxy-2'-fluoro-uridine-3'-phosphate
  modified_base 6: mod_base = OTHER; note = 2'-O-methyl-adenosine-3'-phosphate
  modified_base 7: mod_base = OTHER; note = 2'-deoxy-2'-fluoro-adenosine-3'-phosphate
  modified_base 8: mod_base = OTHER; note = 2'-deoxy-2'-fluoro-adenosine-3'-phosphate
  modified_base 9: mod_base = OTHER; note = 2'-deoxy-2'-fluoro-adenosine-3'-phosphate
  modified_base 10: mod_base = OTHER; note = 2'-O-methyl-guanosine-3'-phosphate
  modified_base 11: mod_base = OTHER; note = 2'-O-methyl-adenosine-3'-phosphate
  modified_base 12: mod_base = OTHER; note = 2'-O-methyl-adenosine-3'-phosphate
  modified_base 13: mod_base = OTHER; note = 2'-O-methyl-guanosine-3'-phosphate
  modified_base 14: mod_base = OTHER; note = 2'-O-methyl-adenosine-3'-phosphate
  modified_base 15: mod_base = OTHER; note = 2'-O-methyl-cytidine-3'-phosphate
  modified_base 16: mod_base = OTHER; note = 2'-O-methyl-adenosine-3'-phosphate
  modified_base 17: mod_base = OTHER; note = 2'-O-methyl-guanosine-3'-phosphate
  modified_base 18: mod_base = OTHER; note = 2'-O-methyl-uridine-3'-phosphate
  modified_base 19: mod_base = OTHER; note = 2'-O-methyl-adenosine-3'-phosphate
tacctaaaagaagacagta

SEQ ID NO: 1614 - RNA, 19 nt, synthetic construct
  source 1..19: mol_type = other RNA
  modified_base 1: mod_base = OTHER; note = 2'-O-methyl-adenosine-3'-phosphorothioate
  modified_base 2: mod_base = OTHER; note = 2'-O-methyl-cytidine-3'-phosphorothioate
  modified_base 3: mod_base = OTHER; note = 2'-O-methyl-cytidine-3'-phosphate
  modified_base 4: mod_base = OTHER; note = 2'-O-methyl-uridine-3'-phosphate
  modified_base 5: mod_base = OTHER; note = 2'-deoxy-2'-fluoro-adenosine-3'-phosphate
  modified_base 6: mod_base = OTHER; note = 2'-O-methyl-adenosine-3'-phosphate
  modified_base 7: mod_base = OTHER; note = 2'-deoxy-2'-fluoro-adenosine-3'-phosphate
  modified_base 8: mod_base = OTHER; note = 2'-deoxy-2'-fluoro-adenosine-3'-phosphate
  modified_base 9: mod_base = OTHER; note = 2'-deoxy-2'-fluoro-guanosine-3'-phosphate
  modified_base 10: mod_base = OTHER; note = 2'-O-methyl-adenosine-3'-phosphate
  modified_base 11: mod_base = OTHER; note = 2'-O-methyl-adenosine-3'-phosphate
  modified_base 12: mod_base = OTHER; note = 2'-O-methyl-guanosine-3'-phosphate
  modified_base 13: mod_base = OTHER; note = 2'-O-methyl-adenosine-3'-phosphate
  modified_base 14: mod_base = OTHER; note = 2'-O-methyl-cytidine-3'-phosphate
  modified_base 15: mod_base = OTHER; note = 2'-O-methyl-adenosine-3'-phosphate
  modified_base 16: mod_base = OTHER; note = 2'-O-methyl-guanosine-3'-phosphate
  modified_base 17: mod_base = OTHER; note = 2'-O-methyl-uridine-3'-phosphate
  modified_base 18: mod_base = OTHER; note = 2'-O-methyl-uridine-3'-phosphate
  modified_base 19: mod_base = OTHER; note = 2'-O-methyl-adenosine-3'-phosphate
acctaaaagaagacagtta

SEQ ID NO: 1615 - RNA, 19 nt, synthetic construct
  source 1..19: mol_type = other RNA
  modified_base 1: mod_base = OTHER; note = 2'-O-methyl-cytidine-3'-phosphorothioate
  modified_base 2: mod_base = OTHER; note = 2'-O-methyl-cytidine-3'-phosphorothioate
  modified_base 3: mod_base = OTHER; note = 2'-O-methyl-uridine-3'-phosphate
  modified_base 4: mod_base = OTHER; note = 2'-O-methyl-adenosine-3'-phosphate
  modified_base 5: mod_base = OTHER; note = 2'-deoxy-2'-fluoro-adenosine-3'-phosphate
  modified_base 6: mod_base = OTHER; note = 2'-O-methyl-adenosine-3'-phosphate
  modified_base 7: mod_base = OTHER; note = 2'-deoxy-2'-fluoro-adenosine-3'-phosphate
  modified_base 8: mod_base = OTHER; note = 2'-deoxy-2'-fluoro-guanosine-3'-phosphate
  modified_base 9: mod_base = OTHER; note = 2'-deoxy-2'-fluoro-adenosine-3'-phosphate
  modified_base 10: mod_base = OTHER; note = 2'-O-methyl-adenosine-3'-phosphate
  modified_base 11: mod_base = OTHER; note = 2'-O-methyl-guanosine-3'-phosphate
  modified_base 12: mod_base = OTHER; note = 2'-O-methyl-adenosine-3'-phosphate
  modified_base 13: mod_base = OTHER; note = 2'-O-methyl-cytidine-3'-phosphate
  modified_base 14: mod_base = OTHER; note = 2'-O-methyl-adenosine-3'-phosphate
  modified_base 15: mod_base = OTHER; note = 2'-O-methyl-guanosine-3'-phosphate
  modified_base 16: mod_base = OTHER; note = 2'-O-methyl-uridine-3'-phosphate
  modified_base 17: mod_base = OTHER; note = 2'-O-methyl-uridine-3'-phosphate
  modified_base 18: mod_base = OTHER; note = 2'-O-methyl-adenosine-3'-phosphate
  modified_base 19: mod_base = OTHER; note = 2'-O-methyl-adenosine-3'-phosphate
cctaaaagaagacagttaa

SEQ ID NO: 1616 - RNA, 19 nt, synthetic construct
  source 1..19: mol_type = other RNA
  modified_base 1: mod_base = OTHER; note = 2'-O-methyl-cytidine-3'-phosphorothioate
  modified_base 2: mod_base = OTHER; note = 2'-O-methyl-uridine-3'-phosphorothioate
  modified_base 3: mod_base = OTHER; note = 2'-O-methyl-adenosine-3'-phosphate
  modified_base 4: mod_base = OTHER; note = 2'-O-methyl-adenosine-3'-phosphate
  modified_base 5: mod_base = OTHER; note = 2'-deoxy-2'-fluoro-adenosine-3'-phosphate
  modified_base 6: mod_base = OTHER; note = 2'-O-methyl-adenosine-3'-phosphate
  modified_base 7: mod_base = OTHER; note = 2'-deoxy-2'-fluoro-guanosine-3'-phosphate
  modified_base 8: mod_base = OTHER; note = 2'-deoxy-2'-fluoro-adenosine-3'-phosphate
  modified_base 9: mod_base = OTHER; note = 2'-deoxy-2'-fluoro-adenosine-3'-phosphate
  modified_base 10: mod_base = OTHER; note = 2'-O-methyl-guanosine-3'-phosphate
  modified_base 11: mod_base = OTHER; note = 2'-O-methyl-adenosine-3'-phosphate
  modified_base 12: mod_base = OTHER; note = 2'-O-methyl-cytidine-3'-phosphate
  modified_base 13: mod_base = OTHER; note = 2'-O-methyl-adenosine-3'-phosphate
  modified_base 14: mod_base = OTHER; note = 2'-O-methyl-guanosine-3'-phosphate
  modified_base 15: mod_base = OTHER; note = 2'-O-methyl-uridine-3'-phosphate
  modified_base 16: mod_base = OTHER; note = 2'-O-methyl-uridine-3'-phosphate
  modified_base 17: mod_base = OTHER; note = 2'-O-methyl-adenosine-3'-phosphate
  modified_base 18: mod_base = OTHER; note = 2'-O-methyl-uridine-3'-phosphate
  modified_base 19: mod_base = OTHER; note = 2'-O-methyl-adenosine-3'-phosphate
ctaaaagaagacagttata

SEQ ID NO: 1617 - RNA, 19 nt, synthetic construct
  source 1..19: mol_type = other RNA
  modified_base 1: mod_base = OTHER; note = 2'-O-methyl-uridine-3'-phosphorothioate
  modified_base 2: mod_base = OTHER; note = 2'-O-methyl-adenosine-3'-phosphorothioate
  modified_base 3: mod_base = OTHER; note = 2'-O-methyl-adenosine-3'-phosphate
  modified_base 4: mod_base = OTHER; note = 2'-O-methyl-adenosine-3'-phosphate
  modified_base 5: mod_base = OTHER; note = 2'-deoxy-2'-fluoro-adenosine-3'-phosphate
  modified_base 6: mod_base = OTHER; note = 2'-O-methyl-guanosine-3'-phosphate
  modified_base 7: mod_base = OTHER; note = 2'-deoxy-2'-fluoro-adenosine-3'-phosphate
  modified_base 8: mod_base = OTHER; note = 2'-deoxy-2'-fluoro-adenosine-3'-phosphate
  modified_base 9: mod_base = OTHER; note = 2'-deoxy-2'-fluoro-guanosine-3'-phosphate
  modified_base 10: mod_base = OTHER; note = 2'-O-methyl-adenosine-3'-phosphate
  modified_base 11: mod_base = OTHER; note = 2'-O-methyl-cytidine-3'-phosphate
  modified_base 12: mod_base = OTHER; note = 2'-O-methyl-adenosine-3'-phosphate
  modified_base 13: mod_base = OTHER; note = 2'-O-methyl-guanosine-3'-phosphate
  modified_base 14: mod_base = OTHER; note = 2'-O-methyl-uridine-3'-phosphate
  modified_base 15: mod_base = OTHER; note = 2'-O-methyl-uridine-3'-phosphate
  modified_base 16: mod_base = OTHER; note = 2'-O-methyl-adenosine-3'-phosphate
  modified_base 17: mod_base = OTHER; note = 2'-O-methyl-uridine-3'-phosphate
  modified_base 18: mod_base = OTHER; note = 2'-O-methyl-cytidine-3'-phosphate
  modified_base 19: mod_base = OTHER; note = 2'-O-methyl-adenosine-3'-phosphate
taaaagaagacagttatca

SEQ ID NO: 1618 - RNA, 19 nt, synthetic construct
  source 1..19: mol_type = other RNA
  modified_base 1: mod_base = OTHER; note = 2'-O-methyl-adenosine-3'-phosphorothioate
  modified_base 2: mod_base = OTHER; note = 2'-O-methyl-adenosine-3'-phosphorothioate
  modified_base 3: mod_base = OTHER; note = 2'-O-methyl-adenosine-3'-phosphate
  modified_base 4: mod_base = OTHER; note = 2'-O-methyl-adenosine-3'-phosphate
  modified_base 5: mod_base = OTHER; note = 2'-deoxy-2'-fluoro-guanosine-3'-phosphate
  modified_base 6: mod_base = OTHER; note = 2'-O-methyl-adenosine-3'-phosphate
  modified_base 7: mod_base = OTHER; note = 2'-deoxy-2'-fluoro-adenosine-3'-phosphate
  modified_base 8: mod_base = OTHER; note = 2'-deoxy-2'-fluoro-guanosine-3'-phosphate
  modified_base 9: mod_base = OTHER; note = 2'-deoxy-2'-fluoro-adenosine-3'-phosphate
  modified_base 10: mod_base = OTHER; note = 2'-O-methyl-cytidine-3'-phosphate
  modified_base 11: mod_base = OTHER; note = 2'-O-methyl-adenosine-3'-phosphate
  modified_base 12: mod_base = OTHER; note = 2'-O-methyl-guanosine-3'-phosphate
  modified_base 13: mod_base = OTHER; note = 2'-O-methyl-uridine-3'-phosphate
  modified_base 14: mod_base = OTHER; note = 2'-O-methyl-uridine-3'-phosphate
  modified_base 15: mod_base = OTHER; note = 2'-O-methyl-adenosine-3'-phosphate
  modified_base 16: mod_base = OTHER; note = 2'-O-methyl-uridine-3'-phosphate
  modified_base 17: mod_base = OTHER; note = 2'-O-methyl-cytidine-3'-phosphate
  modified_base 18: mod_base = OTHER; note = 2'-O-methyl-uridine-3'-phosphate
  modified_base 19: mod_base = OTHER; note = 2'-O-methyl-adenosine-3'-phosphate
aaaagaagacagttatcta

SEQ ID NO: 1619 - RNA, 19 nt, synthetic construct
  source 1..19: mol_type = other RNA
  modified_base 1: mod_base = OTHER; note = 2'-O-methyl-adenosine-3'-phosphorothioate
  modified_base 2: mod_base = OTHER; note = 2'-O-methyl-adenosine-3'-phosphorothioate
  modified_base 3: mod_base = OTHER; note = 2'-O-methyl-adenosine-3'-phosphate
  modified_base 4: mod_base = OTHER; note = 2'-O-methyl-guanosine-3'-phosphate
  modified_base 5: mod_base = OTHER; note = 2'-deoxy-2'-fluoro-adenosine-3'-phosphate
  modified_base 6: mod_base = OTHER; note = 2'-O-methyl-adenosine-3'-phosphate
  modified_base 7: mod_base = OTHER; note = 2'-deoxy-2'-fluoro-guanosine-3'-phosphate
  modified_base 8: mod_base = OTHER; note = 2'-deoxy-2'-fluoro-adenosine-3'-phosphate
  modified_base 9: mod_base = OTHER; note = 2'-deoxy-2'-fluoro-cytidine-3'-phosphate
  modified_base 10: mod_base = OTHER; note = 2'-O-methyl-adenosine-3'-phosphate
  modified_base 11: mod_base = OTHER; note = 2'-O-methyl-guanosine-3'-phosphate
  modified_base 12: mod_base = OTHER; note = 2'-O-methyl-uridine-3'-phosphate
  modified_base 13: mod_base = OTHER; note = 2'-O-methyl-uridine-3'-phosphate
  modified_base 14: mod_base = OTHER; note = 2'-O-methyl-adenosine-3'-phosphate
  modified_base 15: mod_base = OTHER; note = 2'-O-methyl-uridine-3'-phosphate
  modified_base 16: mod_base = OTHER; note = 2'-O-methyl-cytidine-3'-phosphate
  modified_base 17: mod_base = OTHER; note = 2'-O-methyl-uridine-3'-phosphate
  modified_base 18: mod_base = OTHER; note = 2'-O-methyl-cytidine-3'-phosphate
  modified_base 19: mod_base = OTHER; note = 2'-O-methyl-adenosine-3'-phosphate
aaagaagacagttatctca

SEQ ID NO: 1620 - RNA, 19 nt, synthetic construct
  source 1..19: mol_type = other RNA
  modified_base 1: mod_base = OTHER; note = 2'-O-methyl-adenosine-3'-phosphorothioate
  modified_base 2: mod_base = OTHER; note = 2'-O-methyl-adenosine-3'-phosphorothioate
  modified_base 3: mod_base = OTHER; note = 2'-O-methyl-guanosine-3'-phosphate
  modified_base 4: mod_base = OTHER; note = 2'-O-methyl-adenosine-3'-phosphate
  modified_base 5: mod_base = OTHER; note = 2'-deoxy-2'-fluoro-adenosine-3'-phosphate
  modified_base 6: mod_base = OTHER; note = 2'-O-methyl-guanosine-3'-phosphate
  modified_base 7: mod_base = OTHER; note = 2'-deoxy-2'-fluoro-adenosine-3'-phosphate
  modified_base 8: mod_base = OTHER; note = 2'-deoxy-2'-fluoro-cytidine-3'-phosphate
  modified_base 9: mod_base = OTHER; note = 2'-deoxy-2'-fluoro-adenosine-3'-phosphate
  modified_base 10: mod_base = OTHER; note = 2'-O-methyl-guanosine-3'-phosphate
  modified_base 11: mod_base = OTHER; note = 2'-O-methyl-uridine-3'-phosphate
  modified_base 12: mod_base = OTHER; note = 2'-O-methyl-uridine-3'-phosphate
  modified_base 13: mod_base = OTHER; note = 2'-O-methyl-adenosine-3'-phosphate
  modified_base 14: mod_base = OTHER; note = 2'-O-methyl-uridine-3'-phosphate
  modified_base 15: mod_base = OTHER; note = 2'-O-methyl-cytidine-3'-phosphate
  modified_base 16: mod_base = OTHER; note = 2'-O-methyl-uridine-3'-phosphate
  modified_base 17: mod_base = OTHER; note = 2'-O-methyl-cytidine-3'-phosphate
  modified_base 18: mod_base = OTHER; note = 2'-O-methyl-adenosine-3'-phosphate
  modified_base 19: mod_base = OTHER; note = 2'-O-methyl-adenosine-3'-phosphate
aagaagacagttatctcaa

SEQ ID NO: 1621 - RNA, 19 nt, synthetic construct
  source 1..19: mol_type = other RNA
  modified_base 1: mod_base = OTHER; note = 2'-O-methyl-adenosine-3'-phosphorothioate
  modified_base 2: mod_base = OTHER; note = 2'-O-methyl-guanosine-3'-phosphorothioate
  modified_base 3: mod_base = OTHER; note = 2'-O-methyl-adenosine-3'-phosphate
  modified_base 4: mod_base = OTHER; note = 2'-O-methyl-adenosine-3'-phosphate
  modified_base 5: mod_base = OTHER; note = 2'-deoxy-2'-fluoro-guanosine-3'-phosphate
  modified_base 6: mod_base = OTHER; note = 2'-O-methyl-adenosine-3'-phosphate
  modified_base 7: mod_base = OTHER; note = 2'-deoxy-2'-fluoro-cytidine-3'-phosphate
  modified_base 8: mod_base = OTHER; note = 2'-deoxy-2'-fluoro-adenosine-3'-phosphate
  modified_base 9: mod_base = OTHER; note = 2'-deoxy-2'-fluoro-guanosine-3'-phosphate
  modified_base 10: mod_base = OTHER; note = 2'-O-methyl-uridine-3'-phosphate
  modified_base 11: mod_base = OTHER; note = 2'-O-methyl-uridine-3'-phosphate
  modified_base 12: mod_base = OTHER; note = 2'-O-methyl-adenosine-3'-phosphate
  modified_base 13: mod_base = OTHER; note = 2'-O-methyl-uridine-3'-phosphate
  modified_base 14: mod_base = OTHER; note = 2'-O-methyl-cytidine-3'-phosphate
  modified_base 15: mod_base = OTHER; note = 2'-O-methyl-uridine-3'-phosphate
  modified_base 16: mod_base = OTHER; note = 2'-O-methyl-cytidine-3'-phosphate
  modified_base 17: mod_base = OTHER; note = 2'-O-methyl-adenosine-3'-phosphate
  modified_base 18: mod_base = OTHER; note = 2'-O-methyl-uridine-3'-phosphate
  modified_base 19: mod_base = OTHER; note = 2'-O-methyl-adenosine-3'-phosphate
agaagacagttatctcata

SEQ ID NO: 1622 - RNA, 19 nt, synthetic construct
  source 1..19: mol_type = other RNA
  modified_base 1: mod_base = OTHER; note = 2'-O-methyl-adenosine-3'-phosphorothioate
  modified_base 2: mod_base = OTHER; note = 2'-O-methyl-guanosine-3'-phosphorothioate
  modified_base 3: mod_base = OTHER; note = 2'-O-methyl-adenosine-3'-phosphate
  modified_base 4: mod_base = OTHER; note = 2'-O-methyl-cytidine-3'-phosphate
  modified_base 5: mod_base = OTHER; note = 2'-deoxy-2'-fluoro-adenosine-3'-phosphate
  modified_base 6: mod_base = OTHER; note = 2'-O-methyl-guanosine-3'-phosphate
  modified_base 7: mod_base = OTHER; note = 2'-deoxy-2'-fluoro-uridine-3'-phosphate
  modified_base 8: mod_base = OTHER; note = 2'-deoxy-2'-fluoro-uridine-3'-phosphate
  modified_base 9: mod_base = OTHER; note = 2'-deoxy-2'-fluoro-adenosine-3'-phosphate
  modified_base 10: mod_base = OTHER; note = 2'-O-methyl-uridine-3'-phosphate
  modified_base 11: mod_base = OTHER; note = 2'-O-methyl-cytidine-3'-phosphate
  modified_base 12: mod_base = OTHER; note = 2'-O-methyl-uridine-3'-phosphate
  modified_base 13: mod_base = OTHER; note = 2'-O-methyl-cytidine-3'-phosphate
  modified_base 14: mod_base = OTHER; note = 2'-O-methyl-adenosine-3'-phosphate
  modified_base 15: mod_base = OTHER; note = 2'-O-methyl-uridine-3'-phosphate
  modified_base 16: mod_base = OTHER; note = 2'-O-methyl-adenosine-3'-phosphate
  modified_base 17: mod_base = OTHER; note = 2'-O-methyl-uridine-3'-phosphate
  modified_base 18: mod_base = OTHER; note = 2'-O-methyl-uridine-3'-phosphate
  modified_base 19: mod_base = OTHER; note = 2'-O-methyl-adenosine-3'-phosphate
agacagttatctcatatta

SEQ ID NO: 1623 - RNA, 19 nt, synthetic construct
  source 1..19: mol_type = other RNA
  modified_base 1: mod_base = OTHER; note = 2'-O-methyl-guanosine-3'-phosphorothioate
  modified_base 2: mod_base = OTHER; note = 2'-O-methyl-adenosine-3'-phosphorothioate
  modified_base 3: mod_base = OTHER; note = 2'-O-methyl-cytidine-3'-phosphate
  modified_base 4: mod_base = OTHER; note = 2'-O-methyl-adenosine-3'-phosphate
  modified_base 5: mod_base = OTHER; note = 2'-deoxy-2'-fluoro-guanosine-3'-phosphate
  modified_base 6: mod_base = OTHER; note = 2'-O-methyl-uridine-3'-phosphate
  modified_base 7: mod_base = OTHER; note = 2'-deoxy-2'-fluoro-uridine-3'-phosphate
  modified_base 8: mod_base = OTHER; note = 2'-deoxy-2'-fluoro-adenosine-3'-phosphate
  modified_base 9: mod_base = OTHER; note = 2'-deoxy-2'-fluoro-uridine-3'-phosphate
  modified_base 10: mod_base = OTHER; note = 2'-O-methyl-cytidine-3'-phosphate
  modified_base 11: mod_base = OTHER; note = 2'-O-methyl-uridine-3'-phosphate
  modified_base 12: mod_base = OTHER; note = 2'-O-methyl-cytidine-3'-phosphate
  modified_base 13: mod_base = OTHER; note = 2'-O-methyl-adenosine-3'-phosphate
  modified_base 14: mod_base = OTHER; note = 2'-O-methyl-uridine-3'-phosphate
  modified_base 15: mod_base = OTHER; note = 2'-O-methyl-adenosine-3'-phosphate
  modified_base 16: mod_base = OTHER; note = 2'-O-methyl-uridine-3'-phosphate
  modified_base 17: mod_base = OTHER; note = 2'-O-methyl-uridine-3'-phosphate
  modified_base 18: mod_base = OTHER; note = 2'-O-methyl-uridine-3'-phosphate
  modified_base 19: mod_base = OTHER; note = 2'-O-methyl-adenosine-3'-phosphate
gacagttatctcatattta

SEQ ID NO: 1624 - RNA, 19 nt, synthetic construct
  source 1..19: mol_type = other RNA
  modified_base 1: mod_base = OTHER; note = 2'-O-methyl-cytidine-3'-phosphorothioate
  modified_base 2: mod_base = OTHER; note = 2'-O-methyl-adenosine-3'-phosphorothioate
  modified_base 3: mod_base = OTHER; note = 2'-O-methyl-guanosine-3'-phosphate
  modified_base 4: mod_base = OTHER; note = 2'-O-methyl-uridine-3'-phosphate
  modified_base 5: mod_base = OTHER; note = 2'-deoxy-2'-fluoro-uridine-3'-phosphate
  modified_base 6: mod_base = OTHER; note = 2'-O-methyl-adenosine-3'-phosphate
  modified_base 7: mod_base = OTHER; note = 2'-deoxy-2'-fluoro-uridine-3'-phosphate
  modified_base 8: mod_base = OTHER; note = 2'-deoxy-2'-fluoro-cytidine-3'-phosphate
  modified_base 9: mod_base = OTHER; note = 2'-deoxy-2'-fluoro-uridine-3'-phosphate
  modified_base 10: mod_base = OTHER; note = 2'-O-methyl-cytidine-3'-phosphate
  modified_base 11: mod_base = OTHER; note = 2'-O-methyl-adenosine-3'-phosphate
  modified_base 12: mod_base = OTHER; note = 2'-O-methyl-uridine-3'-phosphate
  modified_base 13: mod_base = OTHER; note = 2'-O-methyl-adenosine-3'-phosphate
  modified_base 14: mod_base = OTHER; note = 2'-O-methyl-uridine-3'-phosphate
  modified_base 15: mod_base = OTHER; note = 2'-O-methyl-uridine-3'-phosphate
  modified_base 16: mod_base = OTHER; note = 2'-O-methyl-uridine-3'-phosphate
  modified_base 17: mod_base = OTHER; note = 2'-O-methyl-guanosine-3'-phosphate
  modified_base 18: mod_base = OTHER; note = 2'-O-methyl-guanosine-3'-phosphate
  modified_base 19: mod_base = OTHER; note = 2'-O-methyl-adenosine-3'-phosphate
cagttatctcatatttgga

SEQ ID NO: 1625 - RNA, 19 nt, synthetic construct
  source 1..19: mol_type = other RNA
  modified_base 1: mod_base = OTHER; note = 2'-O-methyl-cytidine-3'-phosphorothioate
  modified_base 2: mod_base = OTHER; note = 2'-O-methyl-uridine-3'-phosphorothioate
  modified_base 3: mod_base = OTHER; note = 2'-O-methyl-uridine-3'-phosphate
  modified_base 4: mod_base = OTHER; note = 2'-O-methyl-adenosine-3'-phosphate
  modified_base 5: mod_base = OTHER; note = 2'-deoxy-2'-fluoro-adenosine-3'-phosphate
  modified_base 6: mod_base = OTHER; note = 2'-O-methyl-adenosine-3'-phosphate
  modified_base 7: mod_base = OTHER; note = 2'-deoxy-2'-fluoro-adenosine-3'-phosphate
  modified_base 8: mod_base = OTHER; note = 2'-deoxy-2'-fluoro-cytidine-3'-phosphate
  modified_base 9: mod_base = OTHER; note = 2'-deoxy-2'-fluoro-uridine-3'-phosphate
  modified_base 10: mod_base = OTHER; note = 2'-O-methyl-uridine-3'-phosphate
  modified_base 11: mod_base = OTHER; note = 2'-O-methyl-cytidine-3'-phosphate
  modified_base 12: mod_base = OTHER; note = 2'-O-methyl-adenosine-3'-phosphate
  modified_base 13: mod_base = OTHER; note = 2'-O-methyl-guanosine-3'-phosphate
  modified_base 14: mod_base = OTHER; note = 2'-O-methyl-adenosine-3'-phosphate
  modified_base 15: mod_base = OTHER; note = 2'-O-methyl-cytidine-3'-phosphate
  modified_base 16: mod_base = OTHER; note = 2'-O-methyl-uridine-3'-phosphate
  modified_base 17: mod_base = OTHER; note = 2'-O-methyl-uridine-3'-phosphate
  modified_base 18: mod_base = OTHER; note = 2'-O-methyl-cytidine-3'-phosphate
  modified_base 19: mod_base = OTHER; note = 2'-O-methyl-adenosine-3'-phosphate
cttaaaacttcagacttca

SEQ ID NO: 1626 - RNA, 19 nt, synthetic construct
  source 1..19: mol_type = other RNA
  modified_base 1: mod_base = OTHER; note = 2'-O-methyl-uridine-3'-phosphorothioate
  modified_base 2: mod_base = OTHER; note = 2'-O-methyl-adenosine-3'-phosphorothioate
  modified_base 3: mod_base = OTHER; note = 2'-O-methyl-adenosine-3'-phosphate
  modified_base 4: mod_base = OTHER; note = 2'-O-methyl-adenosine-3'-phosphate
  modified_base 5: mod_base = OTHER; note = 2'-deoxy-2'-fluoro-adenosine-3'-phosphate
  modified_base 6: mod_base = OTHER; note = 2'-O-methyl-cytidine-3'-phosphate
  modified_base 7: mod_base = OTHER; note = 2'-deoxy-2'-fluoro-uridine-3'-phosphate
  modified_base 8: mod_base = OTHER; note = 2'-deoxy-2'-fluoro-uridine-3'-phosphate
  modified_base 9: mod_base = OTHER; note = 2'-deoxy-2'-fluoro-cytidine-3'-phosphate
  modified_base 10: mod_base = OTHER; note = 2'-O-methyl-adenosine-3'-phosphate
  modified_base 11: mod_base = OTHER; note = 2'-O-methyl-guanosine-3'-phosphate
  modified_base 12: mod_base = OTHER; note = 2'-O-methyl-adenosine-3'-phosphate
  modified_base 13: mod_base = OTHER; note = 2'-O-methyl-cytidine-3'-phosphate
  modified_base 14: mod_base = OTHER; note = 2'-O-methyl-uridine-3'-phosphate
  modified_base 15: mod_base = OTHER; note = 2'-O-methyl-uridine-3'-phosphate
  modified_base 16: mod_base = OTHER; note = 2'-O-methyl-cytidine-3'-phosphate
  modified_base 17: mod_base = OTHER; note = 2'-O-methyl-cytidine-3'-phosphate
  modified_base 18: mod_base = OTHER; note = 2'-O-methyl-uridine-3'-phosphate
  modified_base 19: mod_base = OTHER; note = 2'-O-methyl-adenosine-3'-phosphate
taaaacttcagacttccta

SEQ ID NO: 1627 - RNA, 19 nt, synthetic construct
  source 1..19: mol_type = other RNA
  modified_base 1: mod_base = OTHER; note = 2'-O-methyl-guanosine-3'-phosphorothioate
  modified_base 2: mod_base = OTHER; note = 2'-O-methyl-uridine-3'-phosphorothioate
  modified_base 3: mod_base = OTHER; note = 2'-O-methyl-cytidine-3'-phosphate
  modified_base 4: mod_base = OTHER; note = 2'-O-methyl-cytidine-3'-phosphate
  modified_base 5: mod_base = OTHER; note = 2'-deoxy-2'-fluoro-uridine-3'-phosphate
  modified_base 6: mod_base = OTHER; note = 2'-O-methyl-guanosine-3'-phosphate
  modified_base 7: mod_base = OTHER; note = 2'-deoxy-2'-fluoro-cytidine-3'-phosphate
  modified_base 8: mod_base = OTHER; note = 2'-deoxy-2'-fluoro-uridine-3'-phosphate
  modified_base 9: mod_base = OTHER; note = 2'-deoxy-2'-fluoro-guanosine-3'-phosphate
  modified_base 10: mod_base = OTHER; note = 2'-O-methyl-guanosine-3'-phosphate
  modified_base 11: mod_base = OTHER; note = 2'-O-methyl-uridine-3'-phosphate
  modified_base 12: mod_base = OTHER; note = 2'-O-methyl-adenosine-3'-phosphate
  modified_base 13: mod_base = OTHER; note = 2'-O-methyl-uridine-3'-phosphate
  modified_base 14: mod_base = OTHER; note = 2'-O-methyl-cytidine-3'-phosphate
  modified_base 15: mod_base = OTHER; note = 2'-O-methyl-adenosine-3'-phosphate
  modified_base 16: mod_base = OTHER; note = 2'-O-methyl-uridine-3'-phosphate
  modified_base 17: mod_base = OTHER; note = 2'-O-methyl-guanosine-3'-phosphate
  modified_base 18: mod_base = OTHER; note = 2'-O-methyl-guanosine-3'-phosphate
  modified_base 19: mod_base = OTHER; note = 2'-O-methyl-adenosine-3'-phosphate
gtcctgctggtatcatgga

SEQ ID NO: 1628 - RNA, 19 nt, synthetic construct
  source 1..19: mol_type = other RNA
  modified_base 1: mod_base = OTHER; note = 2'-O-methyl-uridine-3'-phosphorothioate
  modified_base 2: mod_base = OTHER; note = 2'-O-methyl-cytidine-3'-phosphorothioate
  modified_base 3: mod_base = OTHER; note = 2'-O-methyl-cytidine-3'-phosphate
  modified_base 4: mod_base = OTHER; note = 2'-O-methyl-uridine-3'-phosphate
  modified_base 5: mod_base = OTHER; note = 2'-deoxy-2'-fluoro-guanosine-3'-phosphate
  modified_base 6: mod_base = OTHER; note = 2'-O-methyl-cytidine-3'-phosphate
  modified_base 7: mod_base = OTHER; note = 2'-deoxy-2'-fluoro-uridine-3'-phosphate
  modified_base 8: mod_base = OTHER; note = 2'-deoxy-2'-fluoro-guanosine-3'-phosphate
  modified_base 9: mod_base = OTHER; note = 2'-deoxy-2'-fluoro-guanosine-3'-phosphate
  modified_base 10: mod_base = OTHER; note = 2'-O-methyl-uridine-3'-phosphate
  modified_base 11: mod_base = OTHER; note = 2'-O-methyl-adenosine-3'-phosphate
  modified_base 12: mod_base = OTHER; note = 2'-O-methyl-uridine-3'-phosphate
  modified_base 13: mod_base = OTHER; note = 2'-O-methyl-cytidine-3'-phosphate
  modified_base 14: mod_base = OTHER; note = 2'-O-methyl-adenosine-3'-phosphate
  modified_base 15: mod_base = OTHER; note = 2'-O-methyl-uridine-3'-phosphate
  modified_base 16: mod_base = OTHER; note = 2'-O-methyl-guanosine-3'-phosphate
  modified_base 17: mod_base = OTHER; note = 2'-O-methyl-guanosine-3'-phosphate
  modified_base 18: mod_base = OTHER; note = 2'-O-methyl-adenosine-3'-phosphate
  modified_base 19: mod_base = OTHER; note = 2'-O-methyl-adenosine-3'-phosphate
tcctgctggtatcatggaa

SEQ ID NO: 1629 - RNA, 19 nt, synthetic construct
  source 1..19: mol_type = other RNA
  modified_base 1: mod_base = OTHER; note = 2'-O-methyl-cytidine-3'-phosphorothioate
  modified_base 2: mod_base = OTHER; note = 2'-O-methyl-cytidine-3'-phosphorothioate
  modified_base 3: mod_base = OTHER; note = 2'-O-methyl-uridine-3'-phosphate
  modified_base 4: mod_base = OTHER; note = 2'-O-methyl-guanosine-3'-phosphate
  modified_base 5: mod_base = OTHER; note = 2'-deoxy-2'-fluoro-cytidine-3'-phosphate
  modified_base 6: mod_base = OTHER; note = 2'-O-methyl-uridine-3'-phosphate
  modified_base 7: mod_base = OTHER; note = 2'-deoxy-2'-fluoro-guanosine-3'-phosphate
  modified_base 8: mod_base = OTHER; note = 2'-deoxy-2'-fluoro-guanosine-3'-phosphate
  modified_base 9: mod_base = OTHER; note = 2'-deoxy-2'-fluoro-uridine-3'-phosphate
  modified_base 10: mod_base = OTHER; note = 2'-O-methyl-adenosine-3'-phosphate
  modified_base 11: mod_base = OTHER; note = 2'-O-methyl-uridine-3'-phosphate
  modified_base 12: mod_base = OTHER; note = 2'-O-methyl-cytidine-3'-phosphate
  modified_base 13: mod_base = OTHER; note = 2'-O-methyl-adenosine-3'-phosphate
  modified_base 14: mod_base = OTHER; note = 2'-O-methyl-uridine-3'-phosphate
  modified_base 15: mod_base = OTHER; note = 2'-O-methyl-guanosine-3'-phosphate
  modified_base 16: mod_base = OTHER; note = 2'-O-methyl-guanosine-3'-phosphate
  modified_base 17: mod_base = OTHER; note = 2'-O-methyl-adenosine-3'-phosphate
  modified_base 18: mod_base = OTHER; note = 2'-O-methyl-guanosine-3'-phosphate
  modified_base 19: mod_base = OTHER; note = 2'-O-methyl-adenosine-3'-phosphate
cctgctggtatcatggaga

SEQ ID NO: 1630 - RNA, 19 nt, synthetic construct
  source 1..19: mol_type = other RNA
  modified_base 1: mod_base = OTHER; note = 2'-O-methyl-cytidine-3'-phosphorothioate
  modified_base 2: mod_base = OTHER; note = 2'-O-methyl-uridine-3'-phosphorothioate
  modified_base 3: mod_base = OTHER; note = 2'-O-methyl-guanosine-3'-phosphate
  modified_base 4: mod_base = OTHER; note = 2'-O-methyl-cytidine-3'-phosphate
  modified_base 5: mod_base = OTHER; note = 2'-deoxy-2'-fluoro-uridine-3'-phosphate
  modified_base 6: mod_base = OTHER; note = 2'-O-methyl-guanosine-3'-phosphate
  modified_base 7: mod_base = OTHER; note = 2'-deoxy-2'-fluoro-guanosine-3'-phosphate
  modified_base 8: mod_base = OTHER; note = 2'-deoxy-2'-fluoro-uridine-3'-phosphate
  modified_base 9: mod_base = OTHER; note = 2'-deoxy-2'-fluoro-adenosine-3'-phosphate
  modified_base 10: mod_base = OTHER; note = 2'-O-methyl-uridine-3'-phosphate
  modified_base 11: mod_base = OTHER; note = 2'-O-methyl-cytidine-3'-phosphate
  modified_base 12: mod_base = OTHER; note = 2'-O-methyl-adenosine-3'-phosphate
  modified_base 13: mod_base = OTHER; note = 2'-O-methyl-uridine-3'-phosphate
  modified_base 14: mod_base = OTHER; note = 2'-O-methyl-guanosine-3'-phosphate
  modified_base 15: mod_base = OTHER; note = 2'-O-methyl-guanosine-3'-phosphate
  modified_base 16: mod_base = OTHER; note = 2'-O-methyl-adenosine-3'-phosphate
  modified_base 17: mod_base = OTHER; note = 2'-O-methyl-guanosine-3'-phosphate
  modified_base 18: mod_base = OTHER; note = 2'-O-methyl-adenosine-3'-phosphate
  modified_base 19: mod_base = OTHER; note = 2'-O-methyl-adenosine-3'-phosphate
ctgctggtatcatggagaa

SEQ ID NO: 1631 - RNA, 19 nt, synthetic construct
  source 1..19: mol_type = other RNA
  modified_base 1: mod_base = OTHER; note = 2'-O-methyl-uridine-3'-phosphorothioate
  modified_base 2: mod_base = OTHER; note = 2'-O-methyl-guanosine-3'-phosphorothioate
  modified_base 3: mod_base = OTHER; note = 2'-O-methyl-cytidine-3'-phosphate
  modified_base 4: mod_base = OTHER; note = 2'-O-methyl-uridine-3'-phosphate
  modified_base 5: mod_base = OTHER; note = 2'-deoxy-2'-fluoro-guanosine-3'-phosphate
  modified_base 6: mod_base = OTHER; note = 2'-O-methyl-guanosine-3'-phosphate
  modified_base 7: mod_base = OTHER; note = 2'-deoxy-2'-fluoro-uridine-3'-phosphate
  modified_base 8: mod_base = OTHER; note = 2'-deoxy-2'-fluoro-adenosine-3'-phosphate
  modified_base 9: mod_base = OTHER; note = 2'-deoxy-2'-fluoro-uridine-3'-phosphate
  modified_base 10: mod_base = OTHER; note = 2'-O-methyl-cytidine-3'-phosphate
  modified_base 11: mod_base = OTHER; note = 2'-O-methyl-adenosine-3'-phosphate
  modified_base 12: mod_base = OTHER; note = 2'-O-methyl-uridine-3'-phosphate
  modified_base 13: mod_base = OTHER; note = 2'-O-methyl-guanosine-3'-phosphate
  modified_base 14: mod_base = OTHER; note = 2'-O-methyl-guanosine-3'-phosphate
  modified_base 15: mod_base = OTHER; note = 2'-O-methyl-adenosine-3'-phosphate
  modified_base 16: mod_base = OTHER; note = 2'-O-methyl-guanosine-3'-phosphate
  modified_base 17: mod_base = OTHER; note = 2'-O-methyl-adenosine-3'-phosphate
  modified_base 18: mod_base = OTHER; note = 2'-O-methyl-adenosine-3'-phosphate
  modified_base 19: mod_base = OTHER; note = 2'-O-methyl-adenosine-3'-phosphate
tgctggtatcatggagaaa

SEQ ID NO: 1632 - RNA, 19 nt, synthetic construct
  source 1..19: mol_type = other RNA
  modified_base 1: mod_base = OTHER; note = 2'-O-methyl-guanosine-3'-phosphorothioate
  modified_base 2: mod_base = OTHER; note = 2'-O-methyl-cytidine-3'-phosphorothioate
  modified_base 3: mod_base = OTHER; note = 2'-O-methyl-uridine-3'-phosphate
  modified_base 4: mod_base = OTHER; note = 2'-O-methyl-guanosine-3'-phosphate
  modified_base 5: mod_base = OTHER; note = 2'-deoxy-2'-fluoro-guanosine-3'-phosphate
  modified_base 6: mod_base = OTHER; note = 2'-O-methyl-uridine-3'-phosphate
  modified_base 7: mod_base = OTHER; note = 2'-deoxy-2'-fluoro-adenosine-3'-phosphate
  modified_base 8: mod_base = OTHER; note = 2'-deoxy-2'-fluoro-uridine-3'-phosphate
  modified_base 9: mod_base = OTHER; note = 2'-deoxy-2'-fluoro-cytidine-3'-phosphate
  modified_base 10: mod_base = OTHER; note = 2'-O-methyl-adenosine-3'-phosphate
  modified_base 11: mod_base = OTHER; note = 2'-O-methyl-uridine-3'-phosphate
  modified_base 12: mod_base = OTHER; note = 2'-O-methyl-guanosine-3'-phosphate
  modified_base 13: mod_base = OTHER; note = 2'-O-methyl-guanosine-3'-phosphate
  modified_base 14: mod_base = OTHER; note = 2'-O-methyl-adenosine-3'-phosphate
  modified_base 15: mod_base = OTHER; note = 2'-O-methyl-guanosine-3'-phosphate
  modified_base 16: mod_base = OTHER; note = 2'-O-methyl-adenosine-3'-phosphate
  modified_base 17: mod_base = OTHER; note = 2'-O-methyl-adenosine-3'-phosphate
  modified_base 18: mod_base = OTHER; note = 2'-O-methyl-adenosine-3'-phosphate
  modified_base 19: mod_base = OTHER; note = 2'-O-methyl-adenosine-3'-phosphate
gctggtatcatggagaaaa

SEQ ID NO: 1633 - RNA, 19 nt, synthetic construct
  source 1..19: mol_type = other RNA
  modified_base 1: mod_base = OTHER; note = 2'-O-methyl-cytidine-3'-phosphorothioate
  modified_base 2: mod_base = OTHER; note = 2'-O-methyl-uridine-3'-phosphorothioate
  modified_base 3: mod_base = OTHER; note = 2'-O-methyl-guanosine-3'-phosphate
  modified_base 4: mod_base = OTHER; note = 2'-O-methyl-guanosine-3'-phosphate
  modified_base 5: mod_base = OTHER; note = 2'-deoxy-2'-fluoro-uridine-3'-phosphate
  modified_base 6: mod_base = OTHER; note = 2'-O-methyl-adenosine-3'-phosphate
  modified_base 7: mod_base = OTHER; note = 2'-deoxy-2'-fluoro-uridine-3'-phosphate
  modified_base 8: mod_base = OTHER; note = 2'-deoxy-2'-fluoro-cytidine-3'-phosphate
  modified_base 9: mod_base = OTHER; note = 2'-deoxy-2'-fluoro-adenosine-3'-phosphate
  modified_base 10: mod_base = OTHER; note = 2'-O-methyl-uridine-3'-phosphate
  modified_base 11: mod_base = OTHER; note = 2'-O-methyl-guanosine-3'-phosphate
  modified_base 12: mod_base = OTHER; note = 2'-O-methyl-guanosine-3'-phosphate
  modified_base 13: mod_base = OTHER; note = 2'-O-methyl-adenosine-3'-phosphate
  modified_base 14: mod_base = OTHER; note = 2'-O-methyl-guanosine-3'-phosphate
  modified_base 15: mod_base = OTHER; note = 2'-O-methyl-adenosine-3'-phosphate
  modified_base 16: mod_base = OTHER; note = 2'-O-methyl-adenosine-3'-phosphate
  modified_base 17: mod_base = OTHER; note = 2'-O-methyl-adenosine-3'-phosphate
  modified_base 18: mod_base = OTHER; note = 2'-O-methyl-guanosine-3'-phosphate
  modified_base 19: mod_base = OTHER; note = 2'-O-methyl-adenosine-3'-phosphate
ctggtatcatggagaaaga

SEQ ID NO: 1634 - RNA, 19 nt, synthetic construct
  source 1..19: mol_type = other RNA
  modified_base 1: mod_base = OTHER; note = 2'-O-methyl-uridine-3'-phosphorothioate
  modified_base 2: mod_base = OTHER; note = 2'-O-methyl-guanosine-3'-phosphorothioate
  modified_base 3: mod_base = OTHER; note = 2'-O-methyl-guanosine-3'-phosphate
  modified_base 4: mod_base = OTHER; note = 2'-O-methyl-uridine-3'-phosphate
  modified_base 5: mod_base = OTHER; note = 2'-deoxy-2'-fluoro-adenosine-3'-phosphate
  modified_base 6: mod_base = OTHER; note = 2'-O-methyl-uridine-3'-phosphate
  modified_base 7: mod_base = OTHER; note = 2'-deoxy-2'-fluoro-cytidine-3'-phosphate
  modified_base 8: mod_base = OTHER; note = 2'-deoxy-2'-fluoro-adenosine-3'-phosphate
  modified_base 9: mod_base = OTHER; note = 2'-deoxy-2'-fluoro-uridine-3'-phosphate
  modified_base 10: mod_base = OTHER; note = 2'-O-methyl-guanosine-3'-phosphate
  modified_base 11: mod_base = OTHER; note = 2'-O-methyl-guanosine-3'-phosphate
  modified_base 12: mod_base = OTHER; note = 2'-O-methyl-adenosine-3'-phosphate
  modified_base 13: mod_base = OTHER; note = 2'-O-methyl-guanosine-3'-phosphate
  modified_base 14: mod_base = OTHER; note = 2'-O-methyl-adenosine-3'-phosphate
  modified_base 15: mod_base = OTHER; note = 2'-O-methyl-adenosine-3'-phosphate
  modified_base 16: mod_base = OTHER; note = 2'-O-methyl-adenosine-3'-phosphate
  modified_base 17: mod_base = OTHER; note = 2'-O-methyl-guanosine-3'-phosphate
  modified_base 18: mod_base = OTHER; note = 2'-O-methyl-uridine-3'-phosphate
  modified_base 19: mod_base = OTHER; note = 2'-O-methyl-adenosine-3'-phosphate
tggtatcatggagaaagta

SEQ ID NO: 1635 - RNA, 19 nt, synthetic construct
  source 1..19: mol_type = other RNA
  modified_base 1: mod_base = OTHER; note = 2'-O-methyl-guanosine-3'-phosphorothioate
  modified_base 2: mod_base = OTHER; note = 2'-O-methyl-guanosine-3'-phosphorothioate
  modified_base 3: mod_base = OTHER; note = 2'-O-methyl-uridine-3'-phosphate
  modified_base 4: mod_base = OTHER; note = 2'-O-methyl-adenosine-3'-phosphate
  modified_base 5: mod_base = OTHER; note = 2'-deoxy-2'-fluoro-uridine-3'-phosphate
  modified_base 6: mod_base = OTHER; note = 2'-O-methyl-cytidine-3'-phosphate
  modified_base 7: mod_base = OTHER; note = 2'-deoxy-2'-fluoro-adenosine-3'-phosphate
  modified_base 8: mod_base = OTHER; note = 2'-deoxy-2'-fluoro-uridine-3'-phosphate
  modified_base 9: mod_base = OTHER; note = 2'-deoxy-2'-fluoro-guanosine-3'-phosphate
  modified_base 10: mod_base = OTHER; note = 2'-O-methyl-guanosine-3'-phosphate
  modified_base 11: mod_base = OTHER; note = 2'-O-methyl-adenosine-3'-phosphate
  modified_base 12: mod_base = OTHER; note = 2'-O-methyl-guanosine-3'-phosphate
  modified_base 13: mod_base = OTHER; note = 2'-O-methyl-adenosine-3'-phosphate
  modified_base 14: mod_base = OTHER; note = 2'-O-methyl-adenosine-3'-phosphate
  modified_base 15: mod_base = OTHER; note = 2'-O-methyl-adenosine-3'-phosphate
  modified_base 16: mod_base = OTHER; note = 2'-O-methyl-guanosine-3'-phosphate
  modified_base 17: mod_base = OTHER; note = 2'-O-methyl-uridine-3'-phosphate
  modified_base 18: mod_base = OTHER; note = 2'-O-methyl-cytidine-3'-phosphate
  modified_base 19: mod_base = OTHER; note = 2'-O-methyl-adenosine-3'-phosphate
ggtatcatggagaaagtca

SEQ ID NO: 1636 - RNA, 19 nt, synthetic construct
  source 1..19: mol_type = other RNA
  modified_base 1: mod_base = OTHER; note = 2'-O-methyl-guanosine-3'-phosphorothioate
  modified_base 2: mod_base = OTHER; note = 2'-O-methyl-guanosine-3'-phosphorothioate
  modified_base 3: mod_base = OTHER; note = 2'-O-methyl-adenosine-3'-phosphate
  modified_base 4: mod_base = OTHER; note = 2'-O-methyl-guanosine-3'-phosphate
  modified_base 5: mod_base = OTHER; note = 2'-deoxy-2'-fluoro-adenosine-3'-phosphate
  modified_base 6: mod_base = OTHER; note = 2'-O-methyl-adenosine-3'-phosphate
  modified_base 7: mod_base = OTHER; note = 2'-deoxy-2'-fluoro-adenosine-3'-phosphate
  modified_base 8: mod_base = OTHER; note = 2'-deoxy-2'-fluoro-guanosine-3'-phosphate
  modified_base 9: mod_base = OTHER; note = 2'-deoxy-2'-fluoro-uridine-3'-phosphate
  modified_base 10: mod_base = OTHER; note = 2'-O-methyl-cytidine-3'-phosphate
  modified_base 11: mod_base = OTHER; note = 2'-O-methyl-cytidine-3'-phosphate
  modified_base 12: mod_base = OTHER; note = 2'-O-methyl-adenosine-3'-phosphate
  modified_base 13: mod_base = OTHER; note = 2'-O-methyl-adenosine-3'-phosphate
  modified_base 14: mod_base = OTHER; note = 2'-O-methyl-uridine-3'-phosphate
  modified_base 15: mod_base = OTHER; note = 2'-O-methyl-adenosine-3'-phosphate
  modified_base 16: mod_base = OTHER; note = 2'-O-methyl-cytidine-3'-phosphate
  modified_base 17: mod_base = OTHER; note = 2'-O-methyl-cytidine-3'-phosphate
  modified_base 18: mod_base = OTHER; note = 2'-O-methyl-uridine-3'-phosphate
  modified_base 19: mod_base = OTHER; note = 2'-O-methyl-adenosine-3'-phosphate
ggagaaagtccaataccta

SEQ ID NO: 1637 - RNA, 19 nt, synthetic construct
  source 1..19: mol_type = other RNA
  modified_base 1: mod_base = OTHER; note = 2'-O-methyl-guanosine-3'-phosphorothioate
  modified_base 2: mod_base = OTHER; note = 2'-O-methyl-adenosine-3'-phosphorothioate
  modified_base 3: mod_base = OTHER; note = 2'-O-methyl-guanosine-3'-phosphate
  modified_base 4: mod_base = OTHER; note = 2'-O-methyl-adenosine-3'-phosphate
  modified_base 5: mod_base = OTHER; note = 2'-deoxy-2'-fluoro-adenosine-3'-phosphate
  modified_base 6: mod_base = OTHER; note = 2'-O-methyl-adenosine-3'-phosphate
  modified_base 7: mod_base = OTHER; note = 2'-deoxy-2'-fluoro-guanosine-3'-phosphate
  modified_base 8: mod_base = OTHER; note = 2'-deoxy-2'-fluoro-uridine-3'-phosphate
  modified_base 9: mod_base = OTHER; note = 2'-deoxy-2'-fluoro-cytidine-3'-phosphate
  modified_base 10: mod_base = OTHER; note = 2'-O-methyl-cytidine-3'-phosphate
  modified_base 11: mod_base = OTHER; note = 2'-O-methyl-adenosine-3'-phosphate
  modified_base 12: mod_base = OTHER; note = 2'-O-methyl-adenosine-3'-phosphate
  modified_base 13: mod_base = OTHER; note = 2'-O-methyl-uridine-3'-phosphate
  modified_base 14: mod_base = OTHER; note = 2'-O-methyl-adenosine-3'-phosphate
  modified_base 15: mod_base = OTHER; note = 2'-O-methyl-cytidine-3'-phosphate
  modified_base 16: mod_base = OTHER; note = 2'-O-methyl-cytidine-3'-phosphate
  modified_base 17: mod_base = OTHER; note = 2'-O-methyl-uridine-3'-phosphate
  modified_base 18: mod_base = OTHER; note = 2'-O-methyl-cytidine-3'-phosphate
  modified_base 19: mod_base = OTHER; note = 2'-O-methyl-adenosine-3'-phosphate
gagaaagtccaatacctca

SEQ ID NO: 1638 - RNA, 19 nt, synthetic construct
  source 1..19: mol_type = other RNA
  modified_base 1: mod_base = OTHER; note = 2'-O-methyl-guanosine-3'-phosphorothioate
  modified_base 2: mod_base = OTHER; note = 2'-O-methyl-adenosine-3'-phosphorothioate
  modified_base 3: mod_base = OTHER; note = 2'-O-methyl-adenosine-3'-phosphate
  modified_base 4: mod_base = OTHER; note = 2'-O-methyl-adenosine-3'-phosphate
  modified_base 5: mod_base = OTHER; note = 2'-deoxy-2'-fluoro-guanosine-3'-phosphate
  modified_base 6: mod_base = OTHER; note = 2'-O-methyl-uridine-3'-phosphate
  modified_base 7: mod_base = OTHER; note = 2'-deoxy-2'-fluoro-cytidine-3'-phosphate
  modified_base 8: mod_base = OTHER; note = 2'-deoxy-2'-fluoro-cytidine-3'-phosphate
  modified_base 9: mod_base = OTHER; note = 2'-deoxy-2'-fluoro-adenosine-3'-phosphate
  modified_base 10: mod_base = OTHER; note = 2'-O-methyl-adenosine-3'-phosphate
  modified_base 11: mod_base = OTHER; note = 2'-O-methyl-uridine-3'-phosphate
  modified_base 12: mod_base = OTHER; note = 2'-O-methyl-adenosine-3'-phosphate
  modified_base 13: mod_base = OTHER; note = 2'-O-methyl-cytidine-3'-phosphate
  modified_base 14: mod_base = OTHER; note = 2'-O-methyl-cytidine-3'-phosphate
  modified_base 15: mod_base = OTHER; note = 2'-O-methyl-uridine-3'-phosphate
  modified_base 16: mod_base = OTHER; note = 2'-O-methyl-cytidine-3'-phosphate
  modified_base 17: mod_base = OTHER; note = 2'-O-methyl-adenosine-3'-phosphate
  modified_base 18: mod_base = OTHER; note = 2'-O-methyl-cytidine-3'-phosphate
  modified_base 19: mod_base = OTHER; note = 2'-O-methyl-adenosine-3'-phosphate
gaaagtccaatacctcaca

SEQ ID NO: 1639 - RNA, 19 nt, synthetic construct
  source 1..19: mol_type = other RNA
  modified_base 1: mod_base = OTHER; note = 2'-O-methyl-adenosine-3'-phosphorothioate
  modified_base 2: mod_base = OTHER; note = 2'-O-methyl-adenosine-3'-phosphorothioate
  modified_base 3: mod_base = OTHER; note = 2'-O-methyl-adenosine-3'-phosphate
  modified_base 4: mod_base = OTHER; note = 2'-O-methyl-guanosine-3'-phosphate
  modified_base 5: mod_base = OTHER; note = 2'-deoxy-2'-fluoro-uridine-3'-phosphate
  modified_base 6: mod_base = OTHER; note = 2'-O-methyl-cytidine-3'-phosphate
  modified_base 7: mod_base = OTHER; note = 2'-deoxy-2'-fluoro-cytidine-3'-phosphate
  modified_base 8: mod_base = OTHER; note = 2'-deoxy-2'-fluoro-adenosine-3'-phosphate
  modified_base 9: mod_base = OTHER; note = 2'-deoxy-2'-fluoro-adenosine-3'-phosphate
  modified_base 10: mod_base = OTHER; note = 2'-O-methyl-uridine-3'-phosphate
  modified_base 11: mod_base = OTHER; note = 2'-O-methyl-adenosine-3'-phosphate
  modified_base 12: mod_base = OTHER; note = 2'-O-methyl-cytidine-3'-phosphate
  modified_base 13: mod_base = OTHER; note = 2'-O-methyl-cytidine-3'-phosphate
  modified_base 14: mod_base = OTHER; note = 2'-O-methyl-uridine-3'-phosphate
  modified_base 15: mod_base = OTHER; note = 2'-O-methyl-cytidine-3'-phosphate
  modified_base 16: mod_base = OTHER; note = 2'-O-methyl-adenosine-3'-phosphate
  modified_base 17: mod_base = OTHER; note = 2'-O-methyl-cytidine-3'-phosphate
  modified_base 18: mod_base = OTHER; note = 2'-O-methyl-uridine-3'-phosphate
  modified_base 19: mod_base = OTHER; note = 2'-O-methyl-adenosine-3'-phosphate
aaagtccaatacctcacta

SEQ ID NO: 1640 - RNA, 19 nt, synthetic construct
  source 1..19: mol_type = other RNA
  modified_base 1: mod_base = OTHER; note = 2'-O-methyl-uridine-3'-phosphorothioate
  modified_base 2: mod_base = OTHER; note = 2'-O-methyl-cytidine-3'-phosphorothioate
  modified_base 3: mod_base = OTHER; note = 2'-O-methyl-cytidine-3'-phosphate
  modified_base 4: mod_base = OTHER; note = 2'-O-methyl-adenosine-3'-phosphate
  modified_base 5: mod_base = OTHER; note = 2'-deoxy-2'-fluoro-adenosine-3'-phosphate
  modified_base 6: mod_base = OTHER; note = 2'-O-methyl-uridine-3'-phosphate
  modified_base 7: mod_base = OTHER; note = 2'-deoxy-2'-fluoro-adenosine-3'-phosphate
  modified_base 8: mod_base = OTHER; note = 2'-deoxy-2'-fluoro-cytidine-3'-phosphate
  modified_base 9: mod_base = OTHER; note = 2'-deoxy-2'-fluoro-cytidine-3'-phosphate
  modified_base 10: mod_base = OTHER; note = 2'-O-methyl-uridine-3'-phosphate
  modified_base 11: mod_base = OTHER; note = 2'-O-methyl-cytidine-3'-phosphate
  modified_base 12: mod_base = OTHER; note = 2'-O-methyl-adenosine-3'-phosphate
  modified_base 13: mod_base = OTHER; note = 2'-O-methyl-cytidine-3'-phosphate
  modified_base 14: mod_base = OTHER; note = 2'-O-methyl-uridine-3'-phosphate
  modified_base 15: mod_base = OTHER; note = 2'-O-methyl-cytidine-3'-phosphate
  modified_base 16: mod_base = OTHER; note = 2'-O-methyl-guanosine-3'-phosphate
  modified_base 17: mod_base = OTHER; note = 2'-O-methyl-cytidine-3'-phosphate
  modified_base 18: mod_base = OTHER; note = 2'-O-methyl-uridine-3'-phosphate
  modified_base 19: mod_base = OTHER; note = 2'-O-methyl-adenosine-3'-phosphate
tccaatacctcactcgcta

SEQ ID NO: 1641 - RNA, 19 nt, synthetic construct
  source 1..19: mol_type = other RNA
  modified_base 1: mod_base = OTHER; note = 2'-O-methyl-cytidine-3'-phosphorothioate
  modified_base 2: mod_base = OTHER; note = 2'-O-methyl-cytidine-3'-phosphorothioate
  modified_base 3: mod_base = OTHER; note = 2'-O-methyl-uridine-3'-phosphate
  modified_base 4: mod_base = OTHER; note = 2'-O-methyl-cytidine-3'-phosphate
  modified_base 5: mod_base = OTHER; note = 2'-deoxy-2'-fluoro-adenosine-3'-phosphate
  modified_base 6: mod_base = OTHER; note = 2'-O-methyl-cytidine-3'-phosphate
  modified_base 7: mod_base = OTHER; note = 2'-deoxy-2'-fluoro-uridine-3'-phosphate
  modified_base 8: mod_base = OTHER; note = 2'-deoxy-2'-fluoro-cytidine-3'-phosphate
  modified_base 9: mod_base = OTHER; note = 2'-deoxy-2'-fluoro-guanosine-3'-phosphate
  modified_base 10: mod_base = OTHER; note = 2'-O-methyl-cytidine-3'-phosphate
  modified_base 11: mod_base = OTHER; note = 2'-O-methyl-uridine-3'-phosphate
  modified_base 12: mod_base = OTHER; note = 2'-O-methyl-cytidine-3'-phosphate
  modified_base 13: mod_base = OTHER; note = 2'-O-methyl-adenosine-3'-phosphate
  modified_base 14: mod_base = OTHER; note = 2'-O-methyl-guanosine-3'-phosphate
  modified_base 15: mod_base = OTHER; note = 2'-O-methyl-cytidine-3'-phosphate
  modified_base 16: mod_base = OTHER; note = 2'-O-methyl-uridine-3'-phosphate
  modified_base 17: mod_base = OTHER; note = 2'-O-methyl-adenosine-3'-phosphate
  modified_base 18: mod_base = OTHER; note = 2'-O-methyl-uridine-3'-phosphate
  modified_base 19: mod_base = OTHER; note = 2'-O-methyl-adenosine-3'-phosphate
cctcactcgctcagctata

SEQ ID NO: 1642 - RNA, 19 nt, synthetic construct
  source 1..19: mol_type = other RNA
  modified_base 1: mod_base = OTHER; note = 2'-O-methyl-cytidine-3'-phosphorothioate
  modified_base 2: mod_base = OTHER; note = 2'-O-methyl-uridine-3'-phosphorothioate
  modified_base 3: mod_base = OTHER; note = 2'-O-methyl-cytidine-3'-phosphate
  modified_base 4: mod_base = OTHER; note = 2'-O-methyl-adenosine-3'-phosphate
  modified_base 5: mod_base = OTHER; note = 2'-deoxy-2'-fluoro-cytidine-3'-phosphate
  modified_base 6: mod_base = OTHER; note = 2'-O-methyl-uridine-3'-phosphate
  modified_base 7: mod_base = OTHER; note = 2'-deoxy-2'-fluoro-cytidine-3'-phosphate
  modified_base 8: mod_base = OTHER; note = 2'-deoxy-2'-fluoro-guanosine-3'-phosphate
  modified_base 9: mod_base = OTHER; note = 2'-deoxy-2'-fluoro-cytidine-3'-phosphate
  modified_base 10: mod_base = OTHER; note = 2'-O-methyl-uridine-3'-phosphate
  modified_base 11: mod_base = OTHER; note = 2'-O-methyl-cytidine-3'-phosphate
  modified_base 12: mod_base = OTHER; note = 2'-O-methyl-adenosine-3'-phosphate
  modified_base 13: mod_base = OTHER; note = 2'-O-methyl-guanosine-3'-phosphate
  modified_base 14: mod_base = OTHER; note = 2'-O-methyl-cytidine-3'-phosphate
  modified_base 15: mod_base = OTHER; note = 2'-O-methyl-uridine-3'-phosphate
  modified_base 16: mod_base = OTHER; note = 2'-O-methyl-adenosine-3'-phosphate
  modified_base 17: mod_base = OTHER; note = 2'-O-methyl-uridine-3'-phosphate
  modified_base 18: mod_base = OTHER; note = 2'-O-methyl-adenosine-3'-phosphate
  modified_base 19: mod_base = OTHER; note = 2'-O-methyl-adenosine-3'-phosphate
ctcactcgctcagctataa

SEQ ID NO: 1643 - RNA, 19 nt, synthetic construct
  source 1..19: mol_type = other RNA
  modified_base 1: mod_base = OTHER; note = 2'-O-methyl-uridine-3'-phosphorothioate
  modified_base 2: mod_base = OTHER; note = 2'-O-methyl-cytidine-3'-phosphorothioate
  modified_base 3: mod_base = OTHER; note = 2'-O-methyl-adenosine-3'-phosphate
  modified_base 4: mod_base = OTHER; note = 2'-O-methyl-cytidine-3'-phosphate
  modified_base 5: mod_base = OTHER; note = 2'-deoxy-2'-fluoro-uridine-3'-phosphate
  modified_base 6: mod_base = OTHER; note = 2'-O-methyl-cytidine-3'-phosphate
  modified_base 7: mod_base = OTHER; note = 2'-deoxy-2'-fluoro-guanosine-3'-phosphate
  modified_base 8: mod_base = OTHER; note = 2'-deoxy-2'-fluoro-cytidine-3'-phosphate
  modified_base 9: mod_base = OTHER; note = 2'-deoxy-2'-fluoro-uridine-3'-phosphate
  modified_base 10: mod_base = OTHER; note = 2'-O-methyl-cytidine-3'-phosphate
  modified_base 11: mod_base = OTHER; note = 2'-O-methyl-adenosine-3'-phosphate
  modified_base 12: mod_base = OTHER; note = 2'-O-methyl-guanosine-3'-phosphate
  modified_base 13: mod_base = OTHER; note = 2'-O-methyl-cytidine-3'-phosphate
  modified_base 14: mod_base = OTHER; note = 2'-O-methyl-uridine-3'-phosphate
  modified_base 15: mod_base = OTHER; note = 2'-O-methyl-adenosine-3'-phosphate
  modified_base 16: mod_base = OTHER; note = 2'-O-methyl-uridine-3'-phosphate
  modified_base 17: mod_base = OTHER; note = 2'-O-methyl-adenosine-3'-phosphate
  modified_base 18: mod_base = OTHER; note = 2'-O-methyl-adenosine-3'-phosphate
  modified_base 19: mod_base = OTHER; note = 2'-O-methyl-adenosine-3'-phosphate
tcactcgctcagctataaa

SEQ ID NO: 1644 - RNA, 19 nt, synthetic construct
  source 1..19: mol_type = other RNA
  modified_base 1: mod_base = OTHER; note = 2'-O-methyl-cytidine-3'-phosphorothioate
  modified_base 2: mod_base = OTHER; note = 2'-O-methyl-adenosine-3'-phosphorothioate
  modified_base 3: mod_base = OTHER; note = 2'-O-methyl-cytidine-3'-phosphate
  modified_base 4: mod_base = OTHER; note = 2'-O-methyl-uridine-3'-phosphate
  modified_base 5: mod_base = OTHER; note = 2'-deoxy-2'-fluoro-cytidine-3'-phosphate
  modified_base 6: mod_base = OTHER; note = 2'-O-methyl-guanosine-3'-phosphate
  modified_base 7: mod_base = OTHER; note = 2'-deoxy-2'-fluoro-cytidine-3'-phosphate
  modified_base 8: mod_base = OTHER; note = 2'-deoxy-2'-fluoro-uridine-3'-phosphate
  modified_base 9: mod_base = OTHER; note = 2'-deoxy-2'-fluoro-cytidine-3'-phosphate
  modified_base 10: mod_base = OTHER; note = 2'-O-methyl-adenosine-3'-phosphate
  modified_base 11: mod_base = OTHER; note = 2'-O-methyl-guanosine-3'-phosphate
  modified_base 12: mod_base = OTHER; note = 2'-O-methyl-cytidine-3'-phosphate
  modified_base 13: mod_base = OTHER; note = 2'-O-methyl-uridine-3'-phosphate
  modified_base 14: mod_base = OTHER; note = 2'-O-methyl-adenosine-3'-phosphate
  modified_base 15: mod_base = OTHER; note = 2'-O-methyl-uridine-3'-phosphate
  modified_base 16: mod_base = OTHER; note = 2'-O-methyl-adenosine-3'-phosphate
  modified_base 17: mod_base = OTHER; note = 2'-O-methyl-adenosine-3'-phosphate
  modified_base 18: mod_base = OTHER; note = 2'-O-methyl-guanosine-3'-phosphate
  modified_base 19: mod_base = OTHER; note = 2'-O-methyl-adenosine-3'-phosphate
cactcgctcagctataaga

SEQ ID NO: 1645 - RNA, 19 nt, synthetic construct
  source 1..19: mol_type = other RNA
  modified_base 1: mod_base = OTHER; note = 2'-O-methyl-cytidine-3'-phosphorothioate
  modified_base 2: mod_base = OTHER; note = 2'-O-methyl-uridine-3'-phosphorothioate
  modified_base 3: mod_base = OTHER; note = 2'-O-methyl-cytidine-3'-phosphate
  modified_base 4: mod_base = OTHER; note = 2'-O-methyl-guanosine-3'-phosphate
  modified_base 5: mod_base = OTHER; note = 2'-deoxy-2'-fluoro-cytidine-3'-phosphate
  modified_base 6: mod_base = OTHER; note = 2'-O-methyl-uridine-3'-phosphate
  modified_base 7: mod_base = OTHER; note = 2'-deoxy-2'-fluoro-cytidine-3'-phosphate
  modified_base 8: mod_base = OTHER; note = 2'-deoxy-2'-fluoro-adenosine-3'-phosphate
  modified_base 9: mod_base = OTHER; note = 2'-deoxy-2'-fluoro-guanosine-3'-phosphate
  modified_base 10: mod_base = OTHER; note = 2'-O-methyl-cytidine-3'-phosphate
  modified_base 11: mod_base = OTHER; note = 2'-O-methyl-uridine-3'-phosphate
  modified_base 12: mod_base = OTHER; note = 2'-O-methyl-adenosine-3'-phosphate
  modified_base 13: mod_base = OTHER; note = 2'-O-methyl-uridine-3'-phosphate
  modified_base 14: mod_base = OTHER; note = 2'-O-methyl-adenosine-3'-phosphate
  modified_base 15: mod_base = OTHER; note = 2'-O-methyl-adenosine-3'-phosphate
  modified_base 16: mod_base = OTHER; note = 2'-O-methyl-guanosine-3'-phosphate
  modified_base 17: mod_base = OTHER; note = 2'-O-methyl-adenosine-3'-phosphate
  modified_base 18: mod_base = OTHER; note = 2'-O-methyl-adenosine-3'-phosphate
  modified_base 19: mod_base = OTHER; note = 2'-O-methyl-adenosine-3'-phosphate
ctcgctcagctataagaaa

SEQ ID NO: 1646 - RNA, 19 nt, synthetic construct
  source 1..19: mol_type = other RNA
  modified_base 1: mod_base = OTHER; note = 2'-O-methyl-cytidine-3'-phosphorothioate
  modified_base 2: mod_base = OTHER; note = 2'-O-methyl-uridine-3'-phosphorothioate
  modified_base 3: mod_base = OTHER; note = 2'-O-methyl-cytidine-3'-phosphate
  modified_base 4: mod_base = OTHER; note = 2'-O-methyl-adenosine-3'-phosphate
  modified_base 5: mod_base = OTHER; note = 2'-deoxy-2'-fluoro-guanosine-3'-phosphate
  modified_base 6: mod_base = OTHER; note = 2'-O-methyl-cytidine-3'-phosphate
  modified_base 7: mod_base = OTHER; note = 2'-deoxy-2'-fluoro-uridine-3'-phosphate
  modified_base 8: mod_base = OTHER; note = 2'-deoxy-2'-fluoro-adenosine-3'-phosphate
  modified_base 9: mod_base = OTHER; note = 2'-deoxy-2'-fluoro-uridine-3'-phosphate
  modified_base 10: mod_base = OTHER; note = 2'-O-methyl-adenosine-3'-phosphate
  modified_base 11: mod_base = OTHER; note = 2'-O-methyl-adenosine-3'-phosphate
  modified_base 12: mod_base = OTHER; note = 2'-O-methyl-guanosine-3'-phosphate
  modified_base 13: mod_base = OTHER; note = 2'-O-methyl-adenosine-3'-phosphate
  modified_base 14: mod_base = OTHER; note = 2'-O-methyl-adenosine-3'-phosphate
  modified_base 15: mod_base = OTHER; note = 2'-O-methyl-guanosine-3'-phosphate
  modified_base 16: mod_base = OTHER; note = 2'-O-methyl-adenosine-3'-phosphate
  modified_base 17: mod_base = OTHER; note = 2'-O-methyl-guanosine-3'-phosphate
  modified_base 18: mod_base = OTHER; note = 2'-O-methyl-cytidine-3'-phosphate
  modified_base 19: mod_base = OTHER; note = 2'-O-methyl-adenosine-3'-phosphate
ctcagctataagaagagca

SEQ ID NO: 1647 - RNA, 19 nt, synthetic construct
  source 1..19: mol_type = other RNA
  modified_base 1: mod_base = OTHER; note = 2'-O-methyl-uridine-3'-phosphorothioate
  modified_base 2: mod_base = OTHER; note = 2'-O-methyl-cytidine-3'-phosphorothioate
  modified_base 3: mod_base = OTHER; note = 2'-O-methyl-adenosine-3'-phosphate
  modified_base 4: mod_base = OTHER; note = 2'-O-methyl-guanosine-3'-phosphate
  modified_base 5: mod_base = OTHER; note = 2'-deoxy-2'-fluoro-cytidine-3'-phosphate
  modified_base 6: mod_base = OTHER; note = 2'-O-methyl-uridine-3'-phosphate
  modified_base 7: mod_base = OTHER; note = 2'-deoxy-2'-fluoro-adenosine-3'-phosphate
  modified_base 8: mod_base = OTHER; note = 2'-deoxy-2'-fluoro-uridine-3'-phosphate
  modified_base 9: mod_base = OTHER; note = 2'-deoxy-2'-fluoro-adenosine-3'-phosphate
  modified_base 10: mod_base = OTHER; note = 2'-O-methyl-adenosine-3'-phosphate
  modified_base 11: mod_base = OTHER; note = 2'-O-methyl-guanosine-3'-phosphate
  modified_base 12: mod_base = OTHER; note = 2'-O-methyl-adenosine-3'-phosphate
  modified_base 13: mod_base = OTHER; note = 2'-O-methyl-adenosine-3'-phosphate
  modified_base 14: mod_base = OTHER; note = 2'-O-methyl-guanosine-3'-phosphate
  modified_base 15: mod_base = OTHER; note = 2'-O-methyl-adenosine-3'-phosphate
  modified_base 16: mod_base = OTHER; note = 2'-O-methyl-guanosine-3'-phosphate
  modified_base 17: mod_base = OTHER; note = 2'-O-methyl-cytidine-3'-phosphate
  modified_base 18: mod_base = OTHER; note = 2'-O-methyl-cytidine-3'-phosphate
  modified_base 19: mod_base = OTHER; note = 2'-O-methyl-adenosine-3'-phosphate
tcagctataagaagagcca

SEQ ID NO: 1648 - RNA, 19 nt, synthetic construct
  source 1..19: mol_type = other RNA
  modified_base 1: mod_base = OTHER; note = 2'-O-methyl-adenosine-3'-phosphorothioate
  modified_base 2: mod_base = OTHER; note = 2'-O-methyl-guanosine-3'-phosphorothioate
  modified_base 3: mod_base = OTHER; note = 2'-O-methyl-cytidine-3'-phosphate
  modified_base 4: mod_base = OTHER; note = 2'-O-methyl-uridine-3'-phosphate
  modified_base 5: mod_base = OTHER; note = 2'-deoxy-2'-fluoro-adenosine-3'-phosphate
  modified_base 6: mod_base = OTHER; note = 2'-O-methyl-uridine-3'-phosphate
  modified_base 7: mod_base = OTHER; note = 2'-deoxy-2'-fluoro-adenosine-3'-phosphate
  modified_base 8: mod_base = OTHER; note = 2'-deoxy-2'-fluoro-adenosine-3'-phosphate
  modified_base 9: mod_base = OTHER; note = 2'-deoxy-2'-fluoro-guanosine-3'-phosphate
  modified_base 10: mod_base = OTHER; note = 2'-O-methyl-adenosine-3'-phosphate
  modified_base 11: mod_base = OTHER; note = 2'-O-methyl-adenosine-3'-phosphate
  modified_base 12: mod_base = OTHER; note = 2'-O-methyl-guanosine-3'-phosphate
  modified_base 13: mod_base = OTHER; note = 2'-O-methyl-adenosine-3'-phosphate
  modified_base 14: mod_base = OTHER; note = 2'-O-methyl-guanosine-3'-phosphate
  modified_base 15: mod_base = OTHER; note = 2'-O-methyl-cytidine-3'-phosphate
  modified_base 16: mod_base = OTHER; note = 2'-O-methyl-cytidine-3'-phosphate
  modified_base 17: mod_base = OTHER; note = 2'-O-methyl-uridine-3'-phosphate
  modified_base 18: mod_base = OTHER; note = 2'-O-methyl-cytidine-3'-phosphate
  modified_base 19: mod_base = OTHER; note = 2'-O-methyl-adenosine-3'-phosphate
agctataagaagagcctca

SEQ ID NO: 1649 - RNA, 19 nt, synthetic construct
  source 1..19: mol_type = other RNA
  modified_base 1: mod_base = OTHER; note = 2'-O-methyl-uridine-3'-phosphorothioate
  modified_base 2: mod_base = OTHER; note = 2'-O-methyl-adenosine-3'-phosphorothioate
  modified_base 3: mod_base = OTHER; note = 2'-O-methyl-adenosine-3'-phosphate
  modified_base 4: mod_base = OTHER; note = 2'-O-methyl-guanosine-3'-phosphate
  modified_base 5: mod_base = OTHER; note = 2'-deoxy-2'-fluoro-adenosine-3'-phosphate
  modified_base 6: mod_base = OTHER; note = 2'-O-methyl-adenosine-3'-phosphate
  modified_base 7: mod_base = OTHER; note = 2'-deoxy-2'-fluoro-guanosine-3'-phosphate
  modified_base 8: mod_base = OTHER; note = 2'-deoxy-2'-fluoro-adenosine-3'-phosphate
  modified_base 9: mod_base = OTHER; note = 2'-deoxy-2'-fluoro-guanosine-3'-phosphate
  modified_base 10: mod_base = OTHER; note = 2'-O-methyl-cytidine-3'-phosphate
  modified_base 11: mod_base = OTHER; note = 2'-O-methyl-cytidine-3'-phosphate
  modified_base 12: mod_base = OTHER; note = 2'-O-methyl-uridine-3'-phosphate
  modified_base 13: mod_base = OTHER; note = 2'-O-methyl-cytidine-3'-phosphate
  modified_base 14: mod_base = OTHER; note = 2'-O-methyl-adenosine-3'-phosphate
  modified_base 15: mod_base = OTHER; note = 2'-O-methyl-adenosine-3'-phosphate
  modified_base 16: mod_base = OTHER; note = 2'-O-methyl-cytidine-3'-phosphate
  modified_base 17: mod_base = OTHER; note = 2'-O-methyl-cytidine-3'-phosphate
  modified_base 18: mod_base = OTHER; note = 2'-O-methyl-adenosine-3'-phosphate
  modified_base 19: mod_base = OTHER; note = 2'-O-methyl-adenosine-3'-phosphate
taagaagagcctcaaccaa

SEQ ID NO: 1650 - RNA, 19 nt, synthetic construct
  source 1..19: mol_type = other RNA
  modified_base 1: mod_base = OTHER; note = 2'-O-methyl-guanosine-3'-phosphorothioate
  modified_base 2: mod_base = OTHER; note = 2'-O-methyl-cytidine-3'-phosphorothioate
  modified_base 3: mod_base = OTHER; note = 2'-O-methyl-cytidine-3'-phosphate
  modified_base 4: mod_base = OTHER; note = 2'-O-methyl-uridine-3'-phosphate
  modified_base 5: mod_base = OTHER; note = 2'-deoxy-2'-fluoro-cytidine-3'-phosphate
  modified_base 6: mod_base = OTHER; note = 2'-O-methyl-adenosine-3'-phosphate
  modified_base 7: mod_base = OTHER; note = 2'-deoxy-2'-fluoro-adenosine-3'-phosphate
  modified_base 8: mod_base = OTHER; note = 2'-deoxy-2'-fluoro-cytidine-3'-phosphate
  modified_base 9: mod_base = OTHER; note = 2'-deoxy-2'-fluoro-adenosine-3'-phosphate
  modified_base 10: mod_base = OTHER; note = 2'-O-methyl-adenosine-3'-phosphate
  modified_base 11: mod_base = OTHER; note = 2'-O-methyl-guanosine-3'-phosphate
  modified_base 12: mod_base = OTHER; note = 2'-O-methyl-cytidine-3'-phosphate
  modified_base 13: mod_base = OTHER; note = 2'-O-methyl-adenosine-3'-phosphate
  modified_base 14: mod_base = OTHER; note = 2'-O-methyl-cytidine-3'-phosphate
  modified_base 15: mod_base = OTHER; note = 2'-O-methyl-guanosine-3'-phosphate
  modified_base 16: mod_base = OTHER; note = 2'-O-methyl-uridine-3'-phosphate
  modified_base 17: mod_base = OTHER; note = 2'-O-methyl-cytidine-3'-phosphate
  modified_base 18: mod_base = OTHER; note = 2'-O-methyl-adenosine-3'-phosphate
  modified_base 19: mod_base = OTHER; note = 2'-O-methyl-adenosine-3'-phosphate
gcctcaacaagcacgtcaa

SEQ ID NO: 1651 - RNA, 19 nt, synthetic construct
  source 1..19: mol_type = other RNA
  modified_base 1: mod_base = OTHER; note = 2'-O-methyl-cytidine-3'-phosphorothioate
  modified_base 2: mod_base = OTHER; note = 2'-O-methyl-cytidine-3'-phosphorothioate
  modified_base 3: mod_base = OTHER; note = 2'-O-methyl-uridine-3'-phosphate
  modified_base 4: mod_base = OTHER; note = 2'-O-methyl-cytidine-3'-phosphate
  modified_base 5: mod_base = OTHER; note = 2'-deoxy-2'-fluoro-adenosine-3'-phosphate
  modified_base 6: mod_base = OTHER; note = 2'-O-methyl-adenosine-3'-phosphate
  modified_base 7: mod_base = OTHER; note = 2'-deoxy-2'-fluoro-cytidine-3'-phosphate
  modified_base 8: mod_base = OTHER; note = 2'-deoxy-2'-fluoro-adenosine-3'-phosphate
  modified_base 9: mod_base = OTHER; note = 2'-deoxy-2'-fluoro-adenosine-3'-phosphate
  modified_base 10: mod_base = OTHER; note = 2'-O-methyl-guanosine-3'-phosphate
  modified_base 11: mod_base = OTHER; note = 2'-O-methyl-cytidine-3'-phosphate
  modified_base 12: mod_base = OTHER; note = 2'-O-methyl-adenosine-3'-phosphate
  modified_base 13: mod_base = OTHER; note = 2'-O-methyl-cytidine-3'-phosphate
  modified_base 14: mod_base = OTHER; note = 2'-O-methyl-guanosine-3'-phosphate
  modified_base 15: mod_base = OTHER; note = 2'-O-methyl-uridine-3'-phosphate
  modified_base 16: mod_base = OTHER; note = 2'-O-methyl-cytidine-3'-phosphate
  modified_base 17: mod_base = OTHER; note = 2'-O-methyl-adenosine-3'-phosphate
  modified_base 18: mod_base = OTHER; note = 2'-O-methyl-adenosine-3'-phosphate
  modified_base 19: mod_base = OTHER; note = 2'-O-methyl-adenosine-3'-phosphate
cctcaacaagcacgtcaaa

SEQ ID NO: 1652 - RNA, 19 nt, synthetic construct
  source 1..19: mol_type = other RNA
  modified_base 1: mod_base = OTHER; note = 2'-O-methyl-cytidine-3'-phosphorothioate
  modified_base 2: mod_base = OTHER; note = 2'-O-methyl-uridine-3'-phosphorothioate
  modified_base 3: mod_base = OTHER; note = 2'-O-methyl-cytidine-3'-phosphate
  modified_base 4: mod_base = OTHER; note = 2'-O-methyl-adenosine-3'-phosphate
  modified_base 5: mod_base = OTHER; note = 2'-deoxy-2'-fluoro-adenosine-3'-phosphate
  modified_base 6: mod_base = OTHER; note = 2'-O-methyl-cytidine-3'-phosphate
  modified_base 7: mod_base = OTHER; note = 2'-deoxy-2'-fluoro-adenosine-3'-phosphate
  modified_base 8: mod_base = OTHER; note = 2'-deoxy-2'-fluoro-adenosine-3'-phosphate
  modified_base 9: mod_base = OTHER; note = 2'-deoxy-2'-fluoro-guanosine-3'-phosphate
  modified_base 10: mod_base = OTHER; note = 2'-O-methyl-cytidine-3'-phosphate
  modified_base 11: mod_base = OTHER; note = 2'-O-methyl-adenosine-3'-phosphate
  modified_base 12: mod_base = OTHER; note = 2'-O-methyl-cytidine-3'-phosphate
  modified_base 13: mod_base = OTHER; note = 2'-O-methyl-guanosine-3'-phosphate
  modified_base 14: mod_base = OTHER; note = 2'-O-methyl-uridine-3'-phosphate
  modified_base 15: mod_base = OTHER; note = 2'-O-methyl-cytidine-3'-phosphate
  modified_base 16: mod_base = OTHER; note = 2'-O-methyl-adenosine-3'-phosphate
  modified_base 17: mod_base = OTHER; note = 2'-O-methyl-adenosine-3'-phosphate
  modified_base 18: mod_base = OTHER; note = 2'-O-methyl-adenosine-3'-phosphate
  modified_base 19: mod_base = OTHER; note = 2'-O-methyl-adenosine-3'-phosphate
ctcaacaagcacgtcaaaa

SEQ ID NO: 1653 - RNA, 19 nt, synthetic construct
  source 1..19: mol_type = other RNA
  modified_base 1: mod_base = OTHER; note = 2'-O-methyl-uridine-3'-phosphorothioate
  modified_base 2: mod_base = OTHER; note = 2'-O-methyl-cytidine-3'-phosphorothioate
  modified_base 3: mod_base = OTHER; note = 2'-O-methyl-adenosine-3'-phosphate
  modified_base 4: mod_base = OTHER; note = 2'-O-methyl-adenosine-3'-phosphate
  modified_base 5: mod_base = OTHER; note = 2'-deoxy-2'-fluoro-cytidine-3'-phosphate
  modified_base 6: mod_base = OTHER; note = 2'-O-methyl-adenosine-3'-phosphate
  modified_base 7: mod_base = OTHER; note = 2'-deoxy-2'-fluoro-adenosine-3'-phosphate
  modified_base 8: mod_base = OTHER; note = 2'-deoxy-2'-fluoro-guanosine-3'-phosphate
  modified_base 9: mod_base = OTHER; note = 2'-deoxy-2'-fluoro-cytidine-3'-phosphate
  modified_base 10: mod_base = OTHER; note = 2'-O-methyl-adenosine-3'-phosphate
  modified_base 11: mod_base = OTHER; note = 2'-O-methyl-cytidine-3'-phosphate
  modified_base 12: mod_base = OTHER; note = 2'-O-methyl-guanosine-3'-phosphate
  modified_base 13: mod_base = OTHER; note = 2'-O-methyl-uridine-3'-phosphate
  modified_base 14: mod_base = OTHER; note = 2'-O-methyl-cytidine-3'-phosphate
  modified_base 15: mod_base = OTHER; note = 2'-O-methyl-adenosine-3'-phosphate
  modified_base 16: mod_base = OTHER; note = 2'-O-methyl-adenosine-3'-phosphate
  modified_base 17: mod_base = OTHER; note = 2'-O-methyl-adenosine-3'-phosphate
  modified_base 18: mod_base = OTHER; note = 2'-O-methyl-adenosine-3'-phosphate
  modified_base 19: mod_base = OTHER; note = 2'-O-methyl-adenosine-3'-phosphate
tcaacaagcacgtcaaaaa

SEQ ID NO: 1654 - RNA, 19 nt, synthetic construct
  source 1..19: mol_type = other RNA
  modified_base 1: mod_base = OTHER; note = 2'-O-methyl-uridine-3'-phosphorothioate
  modified_base 2: mod_base = OTHER; note = 2'-O-methyl-adenosine-3'-phosphorothioate
  modified_base 3: mod_base = OTHER; note = 2'-O-methyl-uridine-3'-phosphate
  modified_base 4: mod_base = OTHER; note = 2'-O-methyl-cytidine-3'-phosphate
  modified_base 5: mod_base = OTHER; note = 2'-deoxy-2'-fluoro-adenosine-3'-phosphate
  modified_base 6: mod_base = OTHER; note = 2'-O-methyl-adenosine-3'-phosphate
  modified_base 7: mod_base = OTHER; note = 2'-deoxy-2'-fluoro-uridine-3'-phosphate
  modified_base 8: mod_base = OTHER; note = 2'-deoxy-2'-fluoro-uridine-3'-phosphate
  modified_base 9: mod_base = OTHER; note = 2'-deoxy-2'-fluoro-uridine-3'-phosphate
  modified_base 10: mod_base = OTHER; note = 2'-O-methyl-cytidine-3'-phosphate
  modified_base 11: mod_base = OTHER; note = 2'-O-methyl-uridine-3'-phosphate
  modified_base 12: mod_base = OTHER; note = 2'-O-methyl-guanosine-3'-phosphate
  modified_base 13: mod_base = OTHER; note = 2'-O-methyl-uridine-3'-phosphate
  modified_base 14: mod_base = OTHER; note = 2'-O-methyl-cytidine-3'-phosphate
  modified_base 15: mod_base = OTHER; note = 2'-O-methyl-uridine-3'-phosphate
  modified_base 16: mod_base = OTHER; note = 2'-O-methyl-cytidine-3'-phosphate
  modified_base 17: mod_base = OTHER; note = 2'-O-methyl-adenosine-3'-phosphate
  modified_base 18: mod_base = OTHER; note = 2'-O-methyl-uridine-3'-phosphate
  modified_base 19: mod_base = OTHER; note = 2'-O-methyl-adenosine-3'-phosphate
tatcaatttctgtctcata

SEQ ID NO: 1655 - RNA, 19 nt, synthetic construct
  source 1..19: mol_type = other RNA
  modified_base 1: mod_base = OTHER; note = 2'-O-methyl-adenosine-3'-phosphorothioate
  modified_base 2: mod_base = OTHER; note = 2'-O-methyl-uridine-3'-phosphorothioate
  modified_base 3: mod_base = OTHER; note = 2'-O-methyl-cytidine-3'-phosphate
  modified_base 4: mod_base = OTHER; note = 2'-O-methyl-adenosine-3'-phosphate
  modified_base 5: mod_base = OTHER; note = 2'-deoxy-2'-fluoro-adenosine-3'-phosphate
  modified_base 6: mod_base = OTHER; note = 2'-O-methyl-uridine-3'-phosphate
  modified_base 7: mod_base = OTHER; note = 2'-deoxy-2'-fluoro-uridine-3'-phosphate
  modified_base 8: mod_base = OTHER; note = 2'-deoxy-2'-fluoro-uridine-3'-phosphate
  modified_base 9: mod_base = OTHER; note = 2'-deoxy-2'-fluoro-cytidine-3'-phosphate
  modified_base 10: mod_base = OTHER; note = 2'-O-methyl-uridine-3'-phosphate
  modified_base 11: mod_base = OTHER; note = 2'-O-methyl-guanosine-3'-phosphate
  modified_base 12: mod_base = OTHER; note = 2'-O-methyl-uridine-3'-phosphate
  modified_base 13: mod_base = OTHER; note = 2'-O-methyl-cytidine-3'-phosphate
  modified_base 14: mod_base = OTHER; note = 2'-O-methyl-uridine-3'-phosphate
  modified_base 15: mod_base = OTHER; note = 2'-O-methyl-cytidine-3'-phosphate
  modified_base 16: mod_base = OTHER; note = 2'-O-methyl-adenosine-3'-phosphate
  modified_base 17: mod_base = OTHER; note = 2'-O-methyl-uridine-3'-phosphate
  modified_base 18: mod_base = OTHER; note = 2'-O-methyl-cytidine-3'-phosphate
  modified_base 19: mod_base = OTHER; note = 2'-O-methyl-adenosine-3'-phosphate
atcaatttctgtctcatca

SEQ ID NO: 1656 - RNA, 19 nt, synthetic construct
  source 1..19: mol_type = other RNA
  modified_base 1: mod_base = OTHER; note = 2'-O-methyl-uridine-3'-phosphorothioate
  modified_base 2: mod_base = OTHER; note = 2'-O-methyl-cytidine-3'-phosphorothioate
  modified_base 3: mod_base = OTHER; note = 2'-O-methyl-adenosine-3'-phosphate
  modified_base 4: mod_base = OTHER; note = 2'-O-methyl-adenosine-3'-phosphate
  modified_base 5: mod_base = OTHER; note = 2'-deoxy-2'-fluoro-uridine-3'-phosphate
  modified_base 6: mod_base = OTHER; note = 2'-O-methyl-uridine-3'-phosphate
  modified_base 7: mod_base = OTHER; note = 2'-deoxy-2'-fluoro-uridine-3'-phosphate
  modified_base 8: mod_base = OTHER; note = 2'-deoxy-2'-fluoro-cytidine-3'-phosphate
  modified_base 9: mod_base = OTHER; note = 2'-deoxy-2'-fluoro-uridine-3'-phosphate
  modified_base 10: mod_base = OTHER; note = 2'-O-methyl-guanosine-3'-phosphate
  modified_base 11: mod_base = OTHER; note = 2'-O-methyl-uridine-3'-phosphate
  modified_base 12: mod_base = OTHER; note = 2'-O-methyl-cytidine-3'-phosphate
  modified_base 13: mod_base = OTHER; note = 2'-O-methyl-uridine-3'-phosphate
  modified_base 14: mod_base = OTHER; note = 2'-O-methyl-cytidine-3'-phosphate
  modified_base 15: mod_base = OTHER; note = 2'-O-methyl-adenosine-3'-phosphate
  modified_base 16: mod_base = OTHER; note = 2'-O-methyl-uridine-3'-phosphate
  modified_base 17: mod_base = OTHER; note = 2'-O-methyl-cytidine-3'-phosphate
  modified_base 18: mod_base = OTHER; note = 2'-O-methyl-uridine-3'-phosphate
  modified_base 19: mod_base = OTHER; note = 2'-O-methyl-adenosine-3'-phosphate
tcaatttctgtctcatcta

SEQ ID NO: 1657 - RNA, 19 nt, synthetic construct
  source 1..19: mol_type = other RNA
  modified_base 1: mod_base = OTHER; note = 2'-O-methyl-cytidine-3'-phosphorothioate
  modified_base 2: mod_base = OTHER; note = 2'-O-methyl-adenosine-3'-phosphorothioate
  modified_base 3: mod_base = OTHER; note = 2'-O-methyl-adenosine-3'-phosphate
  modified_base 4: mod_base = OTHER; note = 2'-O-methyl-uridine-3'-phosphate
  modified_base 5: mod_base = OTHER; note = 2'-deoxy-2'-fluoro-uridine-3'-phosphate
  modified_base 6: mod_base = OTHER; note = 2'-O-methyl-uridine-3'-phosphate
  modified_base 7: mod_base = OTHER; note = 2'-deoxy-2'-fluoro-cytidine-3'-phosphate
  modified_base 8: mod_base = OTHER; note = 2'-deoxy-2'-fluoro-uridine-3'-phosphate
  modified_base 9: mod_base = OTHER; note = 2'-deoxy-2'-fluoro-guanosine-3'-phosphate
  modified_base 10: mod_base = OTHER; note = 2'-O-methyl-uridine-3'-phosphate
  modified_base 11: mod_base = OTHER; note = 2'-O-methyl-cytidine-3'-phosphate
  modified_base 12: mod_base = OTHER; note = 2'-O-methyl-uridine-3'-phosphate
  modified_base 13: mod_base = OTHER; note = 2'-O-methyl-cytidine-3'-phosphate
  modified_base 14: mod_base = OTHER; note = 2'-O-methyl-adenosine-3'-phosphate
  modified_base 15: mod_base = OTHER; note = 2'-O-methyl-uridine-3'-phosphate
  modified_base 16: mod_base = OTHER; note = 2'-O-methyl-cytidine-3'-phosphate
  modified_base 17: mod_base = OTHER; note = 2'-O-methyl-uridine-3'-phosphate
  modified_base 18: mod_base = OTHER; note = 2'-O-methyl-uridine-3'-phosphate
  modified_base 19: mod_base = OTHER; note = 2'-O-methyl-adenosine-3'-phosphate
caatttctgtctcatctta

SEQ ID NO: 1658 - RNA, 19 nt, synthetic construct
  source 1..19: mol_type = other RNA
  modified_base 1: mod_base = OTHER; note = 2'-O-methyl-uridine-3'-phosphorothioate
  modified_base 2: mod_base = OTHER; note = 2'-O-methyl-uridine-3'-phosphorothioate
  modified_base 3: mod_base = OTHER; note = 2'-O-methyl-cytidine-3'-phosphate
  modified_base 4: mod_base = OTHER; note = 2'-O-methyl-uridine-3'-phosphate
  modified_base 5: mod_base = OTHER; note = 2'-deoxy-2'-fluoro-guanosine-3'-phosphate
  modified_base 6: mod_base = OTHER; note = 2'-O-methyl-uridine-3'-phosphate
  modified_base 7: mod_base = OTHER; note = 2'-deoxy-2'-fluoro-cytidine-3'-phosphate
  modified_base 8: mod_base = OTHER; note = 2'-deoxy-2'-fluoro-uridine-3'-phosphate
  modified_base 9: mod_base = OTHER; note = 2'-deoxy-2'-fluoro-cytidine-3'-phosphate
  modified_base 10: mod_base = OTHER; note = 2'-O-methyl-adenosine-3'-phosphate
  modified_base 11: mod_base = OTHER; note = 2'-O-methyl-uridine-3'-phosphate
  modified_base 12: mod_base = OTHER; note = 2'-O-methyl-cytidine-3'-phosphate
  modified_base 13: mod_base = OTHER; note = 2'-O-methyl-uridine-3'-phosphate
  modified_base 14: mod_base = OTHER; note = 2'-O-methyl-uridine-3'-phosphate
  modified_base 15: mod_base = OTHER; note = 2'-O-methyl-adenosine-3'-phosphate
  modified_base 16: mod_base = OTHER; note = 2'-O-methyl-adenosine-3'-phosphate
  modified_base 17: mod_base = OTHER; note = 2'-O-methyl-uridine-3'-phosphate
  modified_base 18: mod_base = OTHER; note = 2'-O-methyl-adenosine-3'-phosphate
  modified_base 19: mod_base = OTHER; note = 2'-O-methyl-adenosine-3'-phosphate
ttctgtctcatcttaataa

SEQ ID NO: 1659 - RNA, 19 nt, synthetic construct
  source 1..19: mol_type = other RNA
  modified_base 1: mod_base = OTHER; note = 2'-O-methyl-uridine-3'-phosphorothioate
  modified_base 2: mod_base = OTHER; note = 2'-O-methyl-cytidine-3'-phosphorothioate
  modified_base 3: mod_base = OTHER; note = 2'-O-methyl-uridine-3'-phosphate
  modified_base 4: mod_base = OTHER; note = 2'-O-methyl-guanosine-3'-phosphate
  modified_base 5: mod_base = OTHER; note = 2'-deoxy-2'-fluoro-uridine-3'-phosphate
  modified_base 6: mod_base = OTHER; note = 2'-O-methyl-cytidine-3'-phosphate
  modified_base 7: mod_base = OTHER; note = 2'-deoxy-2'-fluoro-uridine-3'-phosphate
  modified_base 8: mod_base = OTHER; note = 2'-deoxy-2'-fluoro-cytidine-3'-phosphate
  modified_base 9: mod_base = OTHER; note = 2'-deoxy-2'-fluoro-adenosine-3'-phosphate
  modified_base 10: mod_base = OTHER; note = 2'-O-methyl-uridine-3'-phosphate
  modified_base 11: mod_base = OTHER; note = 2'-O-methyl-cytidine-3'-phosphate
  modified_base 12: mod_base = OTHER; note = 2'-O-methyl-uridine-3'-phosphate
  modified_base 13: mod_base = OTHER; note = 2'-O-methyl-uridine-3'-phosphate
  modified_base 14: mod_base = OTHER; note = 2'-O-methyl-adenosine-3'-phosphate
  modified_base 15: mod_base = OTHER; note = 2'-O-methyl-adenosine-3'-phosphate
  modified_base 16: mod_base = OTHER; note = 2'-O-methyl-uridine-3'-phosphate
  modified_base 17: mod_base = OTHER; note = 2'-O-methyl-adenosine-3'-phosphate
  modified_base 18: mod_base = OTHER; note = 2'-O-methyl-uridine-3'-phosphate
  modified_base 19: mod_base = OTHER; note = 2'-O-methyl-adenosine-3'-phosphate
tctgtctcatcttaatata

SEQ ID NO: 1660 - RNA, 19 nt, synthetic construct
  source 1..19: mol_type = other RNA
  modified_base 1: mod_base = OTHER; note = 2'-O-methyl-cytidine-3'-phosphorothioate
  modified_base 2: mod_base = OTHER; note = 2'-O-methyl-uridine-3'-phosphorothioate
  modified_base 3: mod_base = OTHER; note = 2'-O-methyl-guanosine-3'-phosphate
  modified_base 4: mod_base = OTHER; note = 2'-O-methyl-uridine-3'-phosphate
  modified_base 5: mod_base = OTHER; note = 2'-deoxy-2'-fluoro-cytidine-3'-phosphate
  modified_base 6: mod_base = OTHER; note = 2'-O-methyl-uridine-3'-phosphate
  modified_base 7: mod_base = OTHER; note = 2'-deoxy-2'-fluoro-cytidine-3'-phosphate
  modified_base 8: mod_base = OTHER; note = 2'-deoxy-2'-fluoro-adenosine-3'-phosphate
  modified_base 9: mod_base = OTHER; note = 2'-deoxy-2'-fluoro-uridine-3'-phosphate
  modified_base 10: mod_base = OTHER; note = 2'-O-methyl-cytidine-3'-phosphate
  modified_base 11: mod_base = OTHER; note = 2'-O-methyl-uridine-3'-phosphate
  modified_base 12: mod_base = OTHER; note = 2'-O-methyl-uridine-3'-phosphate
  modified_base 13: mod_base = OTHER; note = 2'-O-methyl-adenosine-3'-phosphate
  modified_base 14: mod_base = OTHER; note = 2'-O-methyl-adenosine-3'-phosphate
  modified_base 15: mod_base = OTHER; note = 2'-O-methyl-uridine-3'-phosphate
  modified_base 16: mod_base = OTHER; note = 2'-O-methyl-adenosine-3'-phosphate
  modified_base 17: mod_base = OTHER; note = 2'-O-methyl-uridine-3'-phosphate
  modified_base 18: mod_base = OTHER; note = 2'-O-methyl-guanosine-3'-phosphate
  modified_base 19: mod_base = OTHER; note = 2'-O-methyl-adenosine-3'-phosphate
ctgtctcatcttaatatga

SEQ ID NO: 1661 - RNA, 19 nt, synthetic construct
  source 1..19: mol_type = other RNA
  modified_base 1: mod_base = OTHER; note = 2'-O-methyl-uridine-3'-phosphorothioate
  modified_base 2: mod_base = OTHER; note = 2'-O-methyl-adenosine-3'-phosphorothioate
  modified_base 3: mod_base = OTHER; note = 2'-O-methyl-uridine-3'-phosphate
  modified_base 4: mod_base = OTHER; note = 2'-O-methyl-guanosine-3'-phosphate
  modified_base 5: mod_base = OTHER; note = 2'-deoxy-2'-fluoro-uridine-3'-phosphate
  modified_base 6: mod_base = OTHER; note = 2'-O-methyl-cytidine-3'-phosphate
  modified_base 7: mod_base = OTHER; note = 2'-deoxy-2'-fluoro-uridine-3'-phosphate
  modified_base 8: mod_base = OTHER; note = 2'-deoxy-2'-fluoro-cytidine-3'-phosphate
  modified_base 9: mod_base = OTHER; note = 2'-deoxy-2'-fluoro-uridine-3'-phosphate
  modified_base 10: mod_base = OTHER; note = 2'-O-methyl-uridine-3'-phosphate
  modified_base 11: mod_base = OTHER; note = 2'-O-methyl-guanosine-3'-phosphate
  modified_base 12: mod_base = OTHER; note = 2'-O-methyl-cytidine-3'-phosphate
  modified_base 13: mod_base = OTHER; note = 2'-O-methyl-uridine-3'-phosphate
  modified_base 14: mod_base = OTHER; note = 2'-O-methyl-guanosine-3'-phosphate
  modified_base 15: mod_base = OTHER; note = 2'-O-methyl-adenosine-3'-phosphate
  modified_base 16: mod_base = OTHER; note = 2'-O-methyl-uridine-3'-phosphate
  modified_base 17: mod_base = OTHER; note = 2'-O-methyl-cytidine-3'-phosphate
  modified_base 18: mod_base = OTHER; note = 2'-O-methyl-uridine-3'-phosphate
  modified_base 19: mod_base = OTHER; note = 2'-O-methyl-adenosine-3'-phosphate
tatgtctcttgctgatcta

SEQ ID NO: 1662 - RNA, 19 nt, synthetic construct
  source 1..19: mol_type = other RNA
  modified_base 1: mod_base = OTHER; note = 2'-O-methyl-uridine-3'-phosphorothioate
  modified_base 2: mod_base = OTHER; note = 2'-O-methyl-uridine-3'-phosphorothioate
  modified_base 3: mod_base = OTHER; note = 2'-O-methyl-cytidine-3'-phosphate
  modified_base 4: mod_base = OTHER; note = 2'-O-methyl-uridine-3'-phosphate
  modified_base 5: mod_base = OTHER; note = 2'-deoxy-2'-fluoro-cytidine-3'-phosphate
  modified_base 6: mod_base = OTHER; note = 2'-O-methyl-uridine-3'-phosphate
  modified_base 7: mod_base = OTHER; note = 2'-deoxy-2'-fluoro-guanosine-3'-phosphate
  modified_base 8: mod_base = OTHER; note = 2'-deoxy-2'-fluoro-adenosine-3'-phosphate
  modified_base 9: mod_base = OTHER; note = 2'-deoxy-2'-fluoro-adenosine-3'-phosphate
  modified_base 10: mod_base = OTHER; note = 2'-O-methyl-guanosine-3'-phosphate
  modified_base 11: mod_base = OTHER; note = 2'-O-methyl-uridine-3'-phosphate
  modified_base 12: mod_base = OTHER; note = 2'-O-methyl-uridine-3'-phosphate
  modified_base 13: mod_base = OTHER; note = 2'-O-methyl-cytidine-3'-phosphate
  modified_base 14: mod_base = OTHER; note = 2'-O-methyl-uridine-3'-phosphate
  modified_base 15: mod_base = OTHER; note = 2'-O-methyl-guanosine-3'-phosphate
  modified_base 16: mod_base = OTHER; note = 2'-O-methyl-cytidine-3'-phosphate
  modified_base 17: mod_base = OTHER; note = 2'-O-methyl-uridine-3'-phosphate
  modified_base 18: mod_base = OTHER; note = 2'-O-methyl-adenosine-3'-phosphate
  modified_base 19: mod_base = OTHER; note = 2'-O-methyl-adenosine-3'-phosphate
ttctctgaagttctgctaa

SEQ ID NO: 1663 - RNA, 19 nt, synthetic construct
  source 1..19: mol_type = other RNA
  modified_base 1: mod_base = OTHER; note = 2'-O-methyl-cytidine-3'-phosphorothioate
  modified_base 2: mod_base = OTHER; note = 2'-O-methyl-uridine-3'-phosphorothioate
  modified_base 3: mod_base = OTHER; note = 2'-O-methyl-cytidine-3'-phosphate
  modified_base 4: mod_base = OTHER; note = 2'-O-methyl-uridine-3'-phosphate
  modified_base 5: mod_base = OTHER; note = 2'-deoxy-2'-fluoro-guanosine-3'-phosphate
  modified_base 6: mod_base = OTHER; note = 2'-O-methyl-adenosine-3'-phosphate
  modified_base 7: mod_base = OTHER; note = 2'-deoxy-2'-fluoro-adenosine-3'-phosphate
  modified_base 8: mod_base = OTHER; note = 2'-deoxy-2'-fluoro-guanosine-3'-phosphate
  modified_base 9: mod_base = OTHER; note = 2'-deoxy-2'-fluoro-uridine-3'-phosphate
  modified_base 10: mod_base = OTHER; note = 2'-O-methyl-uridine-3'-phosphate
  modified_base 11: mod_base = OTHER; note = 2'-O-methyl-cytidine-3'-phosphate
  modified_base 12: mod_base = OTHER; note = 2'-O-methyl-uridine-3'-phosphate
  modified_base 13: mod_base = OTHER; note = 2'-O-methyl-guanosine-3'-phosphate
  modified_base 14: mod_base = OTHER; note = 2'-O-methyl-cytidine-3'-phosphate
  modified_base 15: mod_base = OTHER; note = 2'-O-methyl-uridine-3'-phosphate
  modified_base 16: mod_base = OTHER; note = 2'-O-methyl-adenosine-3'-phosphate
  modified_base 17: mod_base = OTHER; note = 2'-O-methyl-cytidine-3'-phosphate
  modified_base 18: mod_base = OTHER; note = 2'-O-methyl-adenosine-3'-phosphate
  modified_base 19: mod_base = OTHER; note = 2'-O-methyl-adenosine-3'-phosphate
ctctgaagttctgctacaa

SEQ ID NO: 1664 - RNA, 19 nt, synthetic construct
  source 1..19: mol_type = other RNA
  modified_base 1: mod_base = OTHER; note = 2'-O-methyl-adenosine-3'-phosphorothioate
  modified_base 2: mod_base = OTHER; note = 2'-O-methyl-adenosine-3'-phosphorothioate
  modified_base 3: mod_base = OTHER; note = 2'-O-methyl-guanosine-3'-phosphate
  modified_base 4: mod_base = OTHER; note = 2'-O-methyl-uridine-3'-phosphate
  modified_base 5: mod_base = OTHER; note = 2'-deoxy-2'-fluoro-uridine-3'-phosphate
  modified_base 6: mod_base = OTHER; note = 2'-O-methyl-cytidine-3'-phosphate
  modified_base 7: mod_base = OTHER; note = 2'-deoxy-2'-fluoro-uridine-3'-phosphate
  modified_base 8: mod_base = OTHER; note = 2'-deoxy-2'-fluoro-guanosine-3'-phosphate
  modified_base 9: mod_base = OTHER; note = 2'-deoxy-2'-fluoro-cytidine-3'-phosphate
  modified_base 10: mod_base = OTHER; note = 2'-O-methyl-uridine-3'-phosphate
  modified_base 11: mod_base = OTHER; note = 2'-O-methyl-adenosine-3'-phosphate
  modified_base 12: mod_base = OTHER; note = 2'-O-methyl-cytidine-3'-phosphate
  modified_base 13: mod_base = OTHER; note = 2'-O-methyl-adenosine-3'-phosphate
  modified_base 14: mod_base = OTHER; note = 2'-O-methyl-adenosine-3'-phosphate
  modified_base 15: mod_base = OTHER; note = 2'-O-methyl-cytidine-3'-phosphate
  modified_base 16: mod_base = OTHER; note = 2'-O-methyl-cytidine-3'-phosphate
  modified_base 17: mod_base = OTHER; note = 2'-O-methyl-uridine-3'-phosphate
  modified_base 18: mod_base = OTHER; note = 2'-O-methyl-cytidine-3'-phosphate
  modified_base 19: mod_base = OTHER; note = 2'-O-methyl-adenosine-3'-phosphate
aagttctgctacaacctca

SEQ ID NO: 1665 - RNA, 19 nt, synthetic construct
  source 1..19: mol_type = other RNA
  modified_base 1: mod_base = OTHER; note = 2'-O-methyl-adenosine-3'-phosphorothioate
  modified_base 2: mod_base = OTHER; note = 2'-O-methyl-guanosine-3'-phosphorothioate
  modified_base 3: mod_base = OTHER; note = 2'-O-methyl-uridine-3'-phosphate
  modified_base 4: mod_base = OTHER; note = 2'-O-methyl-uridine-3'-phosphate
  modified_base 5: mod_base = OTHER; note = 2'-deoxy-2'-fluoro-cytidine-3'-phosphate
  modified_base 6: mod_base = OTHER; note = 2'-O-methyl-uridine-3'-phosphate
  modified_base 7: mod_base = OTHER; note = 2'-deoxy-2'-fluoro-guanosine-3'-phosphate
  modified_base 8: mod_base = OTHER; note = 2'-deoxy-2'-fluoro-cytidine-3'-phosphate
  modified_base 9: mod_base = OTHER; note = 2'-deoxy-2'-fluoro-uridine-3'-phosphate
  modified_base 10: mod_base = OTHER; note = 2'-O-methyl-adenosine-3'-phosphate
  modified_base 11: mod_base = OTHER; note = 2'-O-methyl-cytidine-3'-phosphate
  modified_base 12: mod_base = OTHER; note = 2'-O-methyl-adenosine-3'-phosphate
  modified_base 13: mod_base = OTHER; note = 2'-O-methyl-adenosine-3'-phosphate
  modified_base 14: mod_base = OTHER; note = 2'-O-methyl-cytidine-3'-phosphate
  modified_base 15: mod_base = OTHER; note = 2'-O-methyl-cytidine-3'-phosphate
  modified_base 16: mod_base = OTHER; note = 2'-O-methyl-uridine-3'-phosphate
  modified_base 17: mod_base = OTHER; note = 2'-O-methyl-cytidine-3'-phosphate
  modified_base 18: mod_base = OTHER; note = 2'-O-methyl-uridine-3'-phosphate
  modified_base 19: mod_base = OTHER; note = 2'-O-methyl-adenosine-3'-phosphate
agttctgctacaacctcta

SEQ ID NO: 1666 - RNA, 19 nt, synthetic construct
  source 1..19: mol_type = other RNA
  modified_base 1: mod_base = OTHER; note = 2'-O-methyl-guanosine-3'-phosphorothioate
  modified_base 2: mod_base = OTHER; note = 2'-O-methyl-uridine-3'-phosphorothioate
  modified_base 3: mod_base = OTHER; note = 2'-O-methyl-uridine-3'-phosphate
  modified_base 4: mod_base = OTHER; note = 2'-O-methyl-cytidine-3'-phosphate
  modified_base 5: mod_base = OTHER; note = 2'-deoxy-2'-fluoro-uridine-3'-phosphate
  modified_base 6: mod_base = OTHER; note = 2'-O-methyl-guanosine-3'-phosphate
  modified_base 7: mod_base = OTHER; note = 2'-deoxy-2'-fluoro-cytidine-3'-phosphate
  modified_base 8: mod_base = OTHER; note = 2'-deoxy-2'-fluoro-uridine-3'-phosphate
  modified_base 9: mod_base = OTHER; note = 2'-deoxy-2'-fluoro-adenosine-3'-phosphate
  modified_base 10: mod_base = OTHER; note = 2'-O-methyl-cytidine-3'-phosphate
  modified_base 11: mod_base = OTHER; note = 2'-O-methyl-adenosine-3'-phosphate
  modified_base 12: mod_base = OTHER; note = 2'-O-methyl-adenosine-3'-phosphate
  modified_base 13: mod_base = OTHER; note = 2'-O-methyl-cytidine-3'-phosphate
  modified_base 14: mod_base = OTHER; note = 2'-O-methyl-cytidine-3'-phosphate
  modified_base 15: mod_base = OTHER; note = 2'-O-methyl-uridine-3'-phosphate
  modified_base 16: mod_base = OTHER; note = 2'-O-methyl-cytidine-3'-phosphate
  modified_base 17: mod_base = OTHER; note = 2'-O-methyl-uridine-3'-phosphate
  modified_base 18: mod_base = OTHER; note = 2'-O-methyl-adenosine-3'-phosphate
  modified_base 19: mod_base = OTHER; note = 2'-O-methyl-adenosine-3'-phosphate
gttctgctacaacctctaa

SEQ ID NO: 1667 - RNA, 19 nt, synthetic construct
  source 1..19: mol_type = other RNA
  modified_base 1: mod_base = OTHER; note = 2'-O-methyl-uridine-3'-phosphorothioate
  modified_base 2: mod_base = OTHER; note = 2'-O-methyl-cytidine-3'-phosphorothioate
  modified_base 3: mod_base = OTHER; note = 2'-O-methyl-uridine-3'-phosphate
  modified_base 4: mod_base = OTHER; note = 2'-O-methyl-guanosine-3'-phosphate
  modified_base 5: mod_base = OTHER; note = 2'-deoxy-2'-fluoro-cytidine-3'-phosphate
  modified_base 6: mod_base = OTHER; note = 2'-O-methyl-uridine-3'-phosphate
  modified_base 7: mod_base = OTHER; note = 2'-deoxy-2'-fluoro-adenosine-3'-phosphate
  modified_base 8: mod_base = OTHER; note = 2'-deoxy-2'-fluoro-cytidine-3'-phosphate
  modified_base 9: mod_base = OTHER; note = 2'-deoxy-2'-fluoro-adenosine-3'-phosphate
  modified_base 10: mod_base = OTHER; note = 2'-O-methyl-adenosine-3'-phosphate
  modified_base 11: mod_base = OTHER; note = 2'-O-methyl-cytidine-3'-phosphate
  modified_base 12: mod_base = OTHER; note = 2'-O-methyl-cytidine-3'-phosphate
  modified_base 13: mod_base = OTHER; note = 2'-O-methyl-uridine-3'-phosphate
  modified_base 14: mod_base = OTHER; note = 2'-O-methyl-cytidine-3'-phosphate
  modified_base 15: mod_base = OTHER; note = 2'-O-methyl-uridine-3'-phosphate
  modified_base 16: mod_base = OTHER; note = 2'-O-methyl-adenosine-3'-phosphate
  modified_base 17: mod_base = OTHER; note = 2'-O-methyl-guanosine-3'-phosphate
  modified_base 18: mod_base = OTHER; note = 2'-O-methyl-adenosine-3'-phosphate
  modified_base 19: mod_base = OTHER; note = 2'-O-methyl-adenosine-3'-phosphate
tctgctacaacctctagaa

SEQ ID NO: 1668 - RNA, 19 nt, synthetic construct
  source 1..19: mol_type = other RNA
  modified_base 1: mod_base = OTHER; note = 2'-O-methyl-cytidine-3'-phosphorothioate
  modified_base 2: mod_base = OTHER; note = 2'-O-methyl-uridine-3'-phosphorothioate
  modified_base 3: mod_base = OTHER; note = 2'-O-methyl-adenosine-3'-phosphate
  modified_base 4: mod_base = OTHER; note = 2'-O-methyl-cytidine-3'-phosphate
  modified_base 5: mod_base = OTHER; note = 2'-deoxy-2'-fluoro-adenosine-3'-phosphate
  modified_base 6: mod_base = OTHER; note = 2'-O-methyl-adenosine-3'-phosphate
  modified_base 7: mod_base = OTHER; note = 2'-deoxy-2'-fluoro-cytidine-3'-phosphate
  modified_base 8: mod_base = OTHER; note = 2'-deoxy-2'-fluoro-cytidine-3'-phosphate
  modified_base 9: mod_base = OTHER; note = 2'-deoxy-2'-fluoro-uridine-3'-phosphate
  modified_base 10: mod_base = OTHER; note = 2'-O-methyl-cytidine-3'-phosphate
  modified_base 11: mod_base = OTHER; note = 2'-O-methyl-uridine-3'-phosphate
  modified_base 12: mod_base = OTHER; note = 2'-O-methyl-adenosine-3'-phosphate
  modified_base 13: mod_base = OTHER; note = 2'-O-methyl-guanosine-3'-phosphate
  modified_base 14: mod_base = OTHER; note = 2'-O-methyl-adenosine-3'-phosphate
  modified_base 15: mod_base = OTHER; note = 2'-O-methyl-uridine-3'-phosphate
  modified_base 16: mod_base = OTHER; note = 2'-O-methyl-cytidine-3'-phosphate
  modified_base 17: mod_base = OTHER; note = 2'-O-methyl-uridine-3'-phosphate
  modified_base 18: mod_base = OTHER; note = 2'-O-methyl-guanosine-3'-phosphate
  modified_base 19: mod_base = OTHER; note = 2'-O-methyl-adenosine-3'-phosphate
ctacaacctctagatctga

SEQ ID NO: 1669 - RNA, 19 nt, synthetic construct
  source 1..19: mol_type = other RNA
  modified_base 1: mod_base = OTHER; note = 2'-O-methyl-adenosine-3'-phosphorothioate
  modified_base 2: mod_base = OTHER; note = 2'-O-methyl-cytidine-3'-phosphorothioate
  modified_base 3: mod_base = OTHER; note = 2'-O-methyl-adenosine-3'-phosphate
  modified_base 4: mod_base = OTHER; note = 2'-O-methyl-adenosine-3'-phosphate
  modified_base 5: mod_base = OTHER; note = 2'-deoxy-2'-fluoro-cytidine-3'-phosphate
  modified_base 6: mod_base = OTHER; note = 2'-O-methyl-cytidine-3'-phosphate
  modified_base 7: mod_base = OTHER; note = 2'-deoxy-2'-fluoro-uridine-3'-phosphate
  modified_base 8: mod_base = OTHER; note = 2'-deoxy-2'-fluoro-cytidine-3'-phosphate
  modified_base 9: mod_base = OTHER; note = 2'-deoxy-2'-fluoro-uridine-3'-phosphate
  modified_base 10: mod_base = OTHER; note = 2'-O-methyl-adenosine-3'-phosphate
  modified_base 11: mod_base = OTHER; note = 2'-O-methyl-guanosine-3'-phosphate
  modified_base 12: mod_base = OTHER; note = 2'-O-methyl-adenosine-3'-phosphate
  modified_base 13: mod_base = OTHER; note = 2'-O-methyl-uridine-3'-phosphate
  modified_base 14: mod_base = OTHER; note = 2'-O-methyl-cytidine-3'-phosphate
  modified_base 15: mod_base = OTHER; note = 2'-O-methyl-uridine-3'-phosphate
  modified_base 16: mod_base = OTHER; note = 2'-O-methyl-guanosine-3'-phosphate
  modified_base 17: mod_base = OTHER; note = 2'-O-methyl-cytidine-3'-phosphate
  modified_base 18: mod_base = OTHER; note = 2'-O-methyl-adenosine-3'-phosphate
  modified_base 19: mod_base = OTHER; note = 2'-O-methyl-adenosine-3'-phosphate
acaacctctagatctgcaa

SEQ ID NO: 1670 - RNA, 19 nt, synthetic construct
  source 1..19: mol_type = other RNA
  modified_base 1: mod_base = OTHER; note = 2'-O-methyl-guanosine-3'-phosphorothioate
  modified_base 2: mod_base = OTHER; note = 2'-O-methyl-cytidine-3'-phosphorothioate
  modified_base 3: mod_base = OTHER; note = 2'-O-methyl-uridine-3'-phosphate
  modified_base 4: mod_base = OTHER; note = 2'-O-methyl-uridine-3'-phosphate
  modified_base 5: mod_base = OTHER; note = 2'-deoxy-2'-fluoro-guanosine-3'-phosphate
  modified_base 6: mod_base = OTHER; note = 2'-O-methyl-cytidine-3'-phosphate
  modified_base 7: mod_base = OTHER; note = 2'-deoxy-2'-fluoro-cytidine-3'-phosphate
  modified_base 8: mod_base = OTHER; note = 2'-deoxy-2'-fluoro-adenosine-3'-phosphate
  modified_base 9: mod_base = OTHER; note = 2'-deoxy-2'-fluoro-cytidine-3'-phosphate
  modified_base 10: mod_base = OTHER; note = 2'-O-methyl-adenosine-3'-phosphate
  modified_base 11: mod_base = OTHER; note = 2'-O-methyl-uridine-3'-phosphate
  modified_base 12: mod_base = OTHER; note = 2'-O-methyl-cytidine-3'-phosphate
  modified_base 13: mod_base = OTHER; note = 2'-O-methyl-adenosine-3'-phosphate
  modified_base 14: mod_base = OTHER; note = 2'-O-methyl-guanosine-3'-phosphate
  modified_base 15: mod_base = OTHER; note = 2'-O-methyl-cytidine-3'-phosphate
  modified_base 16: mod_base = OTHER; note = 2'-O-methyl-uridine-3'-phosphate
  modified_base 17: mod_base = OTHER; note = 2'-O-methyl-uridine-3'-phosphate
  modified_base 18: mod_base = OTHER; note = 2'-O-methyl-adenosine-3'-phosphate
  modified_base 19: mod_base = OTHER; note = 2'-O-methyl-adenosine-3'-phosphate
gcttgccacatcagcttaa

SEQ ID NO: 1671 - RNA, 19 nt, synthetic construct
  source 1..19: mol_type = other RNA
  modified_base 1: mod_base = OTHER; note = 2'-O-methyl-cytidine-3'-phosphorothioate
  modified_base 2: mod_base = OTHER; note = 2'-O-methyl-uridine-3'-phosphorothioate
  modified_base 3: mod_base = OTHER; note = 2'-O-methyl-uridine-3'-phosphate
  modified_base 4: mod_base = OTHER; note = 2'-O-methyl-guanosine-3'-phosphate
  modified_base 5: mod_base = OTHER; note = 2'-deoxy-2'-fluoro-cytidine-3'-phosphate
  modified_base 6: mod_base = OTHER; note = 2'-O-methyl-cytidine-3'-phosphate
  modified_base 7: mod_base = OTHER; note = 2'-deoxy-2'-fluoro-adenosine-3'-phosphate
  modified_base 8: mod_base = OTHER; note = 2'-deoxy-2'-fluoro-cytidine-3'-phosphate
  modified_base 9: mod_base = OTHER; note = 2'-deoxy-2'-fluoro-adenosine-3'-phosphate
  modified_base 10: mod_base = OTHER; note = 2'-O-methyl-uridine-3'-phosphate
  modified_base 11: mod_base = OTHER; note = 2'-O-methyl-cytidine-3'-phosphate
  modified_base 12: mod_base = OTHER; note = 2'-O-methyl-adenosine-3'-phosphate
  modified_base 13: mod_base = OTHER; note = 2'-O-methyl-guanosine-3'-phosphate
  modified_base 14: mod_base = OTHER; note = 2'-O-methyl-cytidine-3'-phosphate
  modified_base 15: mod_base = OTHER; note = 2'-O-methyl-uridine-3'-phosphate
  modified_base 16: mod_base = OTHER; note = 2'-O-methyl-uridine-3'-phosphate
  modified_base 17: mod_base = OTHER; note = 2'-O-methyl-adenosine-3'-phosphate
  modified_base 18: mod_base = OTHER; note = 2'-O-methyl-adenosine-3'-phosphate
  modified_base 19: mod_base = OTHER; note = 2'-O-methyl-adenosine-3'-phosphate
cttgccacatcagcttaaa

SEQ ID NO: 1672 - RNA, 19 nt, synthetic construct
  source 1..19: mol_type = other RNA
  modified_base 1: mod_base = OTHER; note = 2'-O-methyl-uridine-3'-phosphorothioate
  modified_base 2: mod_base = OTHER; note = 2'-O-methyl-uridine-3'-phosphorothioate
  modified_base 3: mod_base = OTHER; note = 2'-O-methyl-guanosine-3'-phosphate
  modified_base 4: mod_base = OTHER; note = 2'-O-methyl-cytidine-3'-phosphate
  modified_base 5: mod_base = OTHER; note = 2'-deoxy-2'-fluoro-cytidine-3'-phosphate
  modified_base 6: mod_base = OTHER; note = 2'-O-methyl-adenosine-3'-phosphate
  modified_base 7: mod_base = OTHER; note = 2'-deoxy-2'-fluoro-cytidine-3'-phosphate
  modified_base 8: mod_base = OTHER; note = 2'-deoxy-2'-fluoro-adenosine-3'-phosphate
  modified_base 9: mod_base = OTHER; note = 2'-deoxy-2'-fluoro-uridine-3'-phosphate
  modified_base 10: mod_base = OTHER; note = 2'-O-methyl-cytidine-3'-phosphate
  modified_base 11: mod_base = OTHER; note = 2'-O-methyl-adenosine-3'-phosphate
  modified_base 12: mod_base = OTHER; note = 2'-O-methyl-guanosine-3'-phosphate
  modified_base 13: mod_base = OTHER; note = 2'-O-methyl-cytidine-3'-phosphate
  modified_base 14: mod_base = OTHER; note = 2'-O-methyl-uridine-3'-phosphate
  modified_base 15: mod_base = OTHER; note = 2'-O-methyl-uridine-3'-phosphate
  modified_base 16: mod_base = OTHER; note = 2'-O-methyl-adenosine-3'-phosphate
  modified_base 17: mod_base = OTHER; note = 2'-O-methyl-adenosine-3'-phosphate
  modified_base 18: mod_base = OTHER; note = 2'-O-methyl-adenosine-3'-phosphate
  modified_base 19: mod_base = OTHER; note = 2'-O-methyl-adenosine-3'-phosphate
ttgccacatcagcttaaaa

SEQ ID NO: 1673 - RNA, 19 nt, synthetic construct
  source 1..19: mol_type = other RNA
  modified_base 1: mod_base = OTHER; note = 2'-O-methyl-cytidine-3'-phosphorothioate
  modified_base 2: mod_base = OTHER; note = 2'-O-methyl-adenosine-3'-phosphorothioate
  modified_base 3: mod_base = OTHER; note = 2'-O-methyl-cytidine-3'-phosphate
  modified_base 4: mod_base = OTHER; note = 2'-O-methyl-adenosine-3'-phosphate
  modified_base 5: mod_base = OTHER; note = 2'-deoxy-2'-fluoro-uridine-3'-phosphate
  modified_base 6: mod_base = OTHER; note = 2'-O-methyl-cytidine-3'-phosphate
  modified_base 7: mod_base = OTHER; note = 2'-deoxy-2'-fluoro-adenosine-3'-phosphate
  modified_base 8: mod_base = OTHER; note = 2'-deoxy-2'-fluoro-guanosine-3'-phosphate
  modified_base 9: mod_base = OTHER; note = 2'-deoxy-2'-fluoro-cytidine-3'-phosphate
  modified_base 10: mod_base = OTHER; note = 2'-O-methyl-uridine-3'-phosphate
  modified_base 11: mod_base = OTHER; note = 2'-O-methyl-uridine-3'-phosphate
  modified_base 12: mod_base = OTHER; note = 2'-O-methyl-adenosine-3'-phosphate
  modified_base 13: mod_base = OTHER; note = 2'-O-methyl-adenosine-3'-phosphate
  modified_base 14: mod_base = OTHER; note = 2'-O-methyl-adenosine-3'-phosphate
  modified_base 15: mod_base = OTHER; note = 2'-O-methyl-adenosine-3'-phosphate
  modified_base 16: mod_base = OTHER; note = 2'-O-methyl-uridine-3'-phosphate
  modified_base 17: mod_base = OTHER; note = 2'-O-methyl-cytidine-3'-phosphate
  modified_base 18: mod_base = OTHER; note = 2'-O-methyl-uridine-3'-phosphate
  modified_base 19: mod_base = OTHER; note = 2'-O-methyl-adenosine-3'-phosphate
cacatcagcttaaaatcta

SEQ ID NO: 1674 - RNA, 19 nt, synthetic construct
  source 1..19: mol_type = other RNA
  modified_base 1: mod_base = OTHER; note = 2'-O-methyl-adenosine-3'-phosphorothioate
  modified_base 2: mod_base = OTHER; note = 2'-O-methyl-cytidine-3'-phosphorothioate
  modified_base 3: mod_base = OTHER; note = 2'-O-methyl-adenosine-3'-phosphate
  modified_base 4: mod_base = OTHER; note = 2'-O-methyl-uridine-3'-phosphate
  modified_base 5: mod_base = OTHER; note = 2'-deoxy-2'-fluoro-cytidine-3'-phosphate
  modified_base 6: mod_base = OTHER; note = 2'-O-methyl-adenosine-3'-phosphate
  modified_base 7: mod_base = OTHER; note = 2'-deoxy-2'-fluoro-guanosine-3'-phosphate
  modified_base 8: mod_base = OTHER; note = 2'-deoxy-2'-fluoro-cytidine-3'-phosphate
  modified_base 9: mod_base = OTHER; note = 2'-deoxy-2'-fluoro-uridine-3'-phosphate
  modified_base 10: mod_base = OTHER; note = 2'-O-methyl-uridine-3'-phosphate
  modified_base 11: mod_base = OTHER; note = 2'-O-methyl-adenosine-3'-phosphate
  modified_base 12: mod_base = OTHER; note = 2'-O-methyl-adenosine-3'-phosphate
  modified_base 13: mod_base = OTHER; note = 2'-O-methyl-adenosine-3'-phosphate
  modified_base 14: mod_base = OTHER; note = 2'-O-methyl-adenosine-3'-phosphate
  modified_base 15: mod_base = OTHER; note = 2'-O-methyl-uridine-3'-phosphate
  modified_base 16: mod_base = OTHER; note = 2'-O-methyl-cytidine-3'-phosphate
  modified_base 17: mod_base = OTHER; note = 2'-O-methyl-uridine-3'-phosphate
  modified_base 18: mod_base = OTHER; note = 2'-O-methyl-guanosine-3'-phosphate
  modified_base 19: mod_base = OTHER; note = 2'-O-methyl-adenosine-3'-phosphate
acatcagcttaaaatctga

SEQ ID NO: 1675 - RNA, 19 nt, synthetic construct
  source 1..19: mol_type = other RNA
  modified_base 1: mod_base = OTHER; note = 2'-O-methyl-cytidine-3'-phosphorothioate
  modified_base 2: mod_base = OTHER; note = 2'-O-methyl-adenosine-3'-phosphorothioate
  modified_base 3: mod_base = OTHER; note = 2'-O-methyl-uridine-3'-phosphate
  modified_base 4: mod_base = OTHER; note = 2'-O-methyl-cytidine-3'-phosphate
  modified_base 5: mod_base = OTHER; note = 2'-deoxy-2'-fluoro-adenosine-3'-phosphate
  modified_base 6: mod_base = OTHER; note = 2'-O-methyl-guanosine-3'-phosphate
  modified_base 7: mod_base = OTHER; note = 2'-deoxy-2'-fluoro-cytidine-3'-phosphate
  modified_base 8: mod_base = OTHER; note = 2'-deoxy-2'-fluoro-uridine-3'-phosphate
  modified_base 9: mod_base = OTHER; note = 2'-deoxy-2'-fluoro-uridine-3'-phosphate
  modified_base 10: mod_base = OTHER; note = 2'-O-methyl-adenosine-3'-phosphate
  modified_base 11: mod_base = OTHER; note = 2'-O-methyl-adenosine-3'-phosphate
  modified_base 12: mod_base = OTHER; note = 2'-O-methyl-adenosine-3'-phosphate
  modified_base 13: mod_base = OTHER; note = 2'-O-methyl-adenosine-3'-phosphate
  modified_base 14: mod_base = OTHER; note = 2'-O-methyl-uridine-3'-phosphate
  modified_base 15: mod_base = OTHER; note = 2'-O-methyl-cytidine-3'-phosphate
  modified_base 16: mod_base = OTHER; note = 2'-O-methyl-uridine-3'-phosphate
  modified_base 17: mod_base = OTHER; note = 2'-O-methyl-guanosine-3'-phosphate
  modified_base 18: mod_base = OTHER; note = 2'-O-methyl-uridine-3'-phosphate
  modified_base 19: mod_base = OTHER; note = 2'-O-methyl-adenosine-3'-phosphate
catcagcttaaaatctgta

SEQ ID NO: 1676 - RNA, 19 nt, synthetic construct
  source 1..19: mol_type = other RNA
  modified_base 1: mod_base = OTHER; note = 2'-O-methyl-adenosine-3'-phosphorothioate
  modified_base 2: mod_base = OTHER; note = 2'-O-methyl-uridine-3'-phosphorothioate
  modified_base 3: mod_base = OTHER; note = 2'-O-methyl-cytidine-3'-phosphate
  modified_base 4: mod_base = OTHER; note = 2'-O-methyl-adenosine-3'-phosphate
  modified_base 5: mod_base = OTHER; note = 2'-deoxy-2'-fluoro-guanosine-3'-phosphate
  modified_base 6: mod_base = OTHER; note = 2'-O-methyl-cytidine-3'-phosphate
  modified_base 7: mod_base = OTHER; note = 2'-deoxy-2'-fluoro-uridine-3'-phosphate
  modified_base 8: mod_base = OTHER; note = 2'-deoxy-2'-fluoro-uridine-3'-phosphate
  modified_base 9: mod_base = OTHER; note = 2'-deoxy-2'-fluoro-adenosine-3'-phosphate
  modified_base 10: mod_base = OTHER; note = 2'-O-methyl-adenosine-3'-phosphate
  modified_base 11: mod_base = OTHER; note = 2'-O-methyl-adenosine-3'-phosphate
  modified_base 12: mod_base = OTHER; note = 2'-O-methyl-adenosine-3'-phosphate
  modified_base 13: mod_base = OTHER; note = 2'-O-methyl-uridine-3'-phosphate
  modified_base 14: mod_base = OTHER; note = 2'-O-methyl-cytidine-3'-phosphate
  modified_base 15: mod_base = OTHER; note = 2'-O-methyl-uridine-3'-phosphate
  modified_base 16: mod_base = OTHER; note = 2'-O-methyl-guanosine-3'-phosphate
  modified_base 17: mod_base = OTHER; note = 2'-O-methyl-uridine-3'-phosphate
  modified_base 18: mod_base = OTHER; note = 2'-O-methyl-cytidine-3'-phosphate
  modified_base 19: mod_base = OTHER; note = 2'-O-methyl-adenosine-3'-phosphate
atcagcttaaaatctgtca

SEQ ID NO: 1677 - RNA, 19 nt, synthetic construct
  source 1..19: mol_type = other RNA
  modified_base 1: mod_base = OTHER; note = 2'-O-methyl-uridine-3'-phosphorothioate
  modified_base 2: mod_base = OTHER; note = 2'-O-methyl-cytidine-3'-phosphorothioate
  modified_base 3: mod_base = OTHER; note = 2'-O-methyl-adenosine-3'-phosphate
  modified_base 4: mod_base = OTHER; note = 2'-O-methyl-guanosine-3'-phosphate
  modified_base 5: mod_base = OTHER; note = 2'-deoxy-2'-fluoro-cytidine-3'-phosphate
  modified_base 6: mod_base = OTHER; note = 2'-O-methyl-uridine-3'-phosphate
  modified_base 7: mod_base = OTHER; note = 2'-deoxy-2'-fluoro-uridine-3'-phosphate
  modified_base 8: mod_base = OTHER; note = 2'-deoxy-2'-fluoro-adenosine-3'-phosphate
  modified_base 9: mod_base = OTHER; note = 2'-deoxy-2'-fluoro-adenosine-3'-phosphate
  modified_base 10: mod_base = OTHER; note = 2'-O-methyl-adenosine-3'-phosphate
  modified_base 11: mod_base = OTHER; note = 2'-O-methyl-adenosine-3'-phosphate
  modified_base 12: mod_base = OTHER; note = 2'-O-methyl-uridine-3'-phosphate
  modified_base 13: mod_base = OTHER; note = 2'-O-methyl-cytidine-3'-phosphate
  modified_base 14: mod_base = OTHER; note = 2'-O-methyl-uridine-3'-phosphate
  modified_base 15: mod_base = OTHER; note = 2'-O-methyl-guanosine-3'-phosphate
  modified_base 16: mod_base = OTHER; note = 2'-O-methyl-uridine-3'-phosphate
  modified_base 17: mod_base = OTHER; note = 2'-O-methyl-cytidine-3'-phosphate
  modified_base 18: mod_base = OTHER; note = 2'-O-methyl-adenosine-3'-phosphate
  modified_base 19: mod_base = OTHER; note = 2'-O-methyl-adenosine-3'-phosphate
tcagcttaaaatctgtcaa

SEQ ID NO: 1678 - RNA, 19 nt, synthetic construct
  source 1..19: mol_type = other RNA
  modified_base 1: mod_base = OTHER; note = 2'-O-methyl-cytidine-3'-phosphorothioate
  modified_base 2: mod_base = OTHER; note = 2'-O-methyl-adenosine-3'-phosphorothioate
  modified_base 3: mod_base = OTHER; note = 2'-O-methyl-guanosine-3'-phosphate
  modified_base 4: mod_base = OTHER; note = 2'-O-methyl-cytidine-3'-phosphate
  modified_base 5: mod_base = OTHER; note = 2'-deoxy-2'-fluoro-uridine-3'-phosphate
  modified_base 6: mod_base = OTHER; note = 2'-O-methyl-uridine-3'-phosphate
  modified_base 7: mod_base = OTHER; note = 2'-deoxy-2'-fluoro-adenosine-3'-phosphate
  modified_base 8: mod_base = OTHER; note = 2'-deoxy-2'-fluoro-adenosine-3'-phosphate
  modified_base 9: mod_base = OTHER; note = 2'-deoxy-2'-fluoro-adenosine-3'-phosphate
  modified_base 10: mod_base = OTHER; note = 2'-O-methyl-adenosine-3'-phosphate
  modified_base 11: mod_base = OTHER; note = 2'-O-methyl-uridine-3'-phosphate
  modified_base 12: mod_base = OTHER; note = 2'-O-methyl-cytidine-3'-phosphate
  modified_base 13: mod_base = OTHER; note = 2'-O-methyl-uridine-3'-phosphate
  modified_base 14: mod_base = OTHER; note = 2'-O-methyl-guanosine-3'-phosphate
  modified_base 15: mod_base = OTHER; note = 2'-O-methyl-uridine-3'-phosphate
  modified_base 16: mod_base = OTHER; note = 2'-O-methyl-cytidine-3'-phosphate
  modified_base 17: mod_base = OTHER; note = 2'-O-methyl-adenosine-3'-phosphate
  modified_base 18: mod_base = OTHER; note = 2'-O-methyl-uridine-3'-phosphate
  modified_base 19: mod_base = OTHER; note = 2'-O-methyl-adenosine-3'-phosphate
cagcttaaaatctgtcata

SEQ ID NO: 1679 - RNA, 19 nt, synthetic construct
  source 1..19: mol_type = other RNA
  modified_base 1: mod_base = OTHER; note = 2'-O-methyl-adenosine-3'-phosphorothioate
  modified_base 2: mod_base = OTHER; note = 2'-O-methyl-guanosine-3'-phosphorothioate
  modified_base 3: mod_base = OTHER; note = 2'-O-methyl-cytidine-3'-phosphate
  modified_base 4: mod_base = OTHER; note = 2'-O-methyl-uridine-3'-phosphate
  modified_base 5: mod_base = OTHER; note = 2'-deoxy-2'-fluoro-uridine-3'-phosphate
  modified_base 6: mod_base = OTHER; note = 2'-O-methyl-adenosine-3'-phosphate
  modified_base 7: mod_base = OTHER; note = 2'-deoxy-2'-fluoro-adenosine-3'-phosphate
  modified_base 8: mod_base = OTHER; note = 2'-deoxy-2'-fluoro-adenosine-3'-phosphate
  modified_base 9: mod_base = OTHER; note = 2'-deoxy-2'-fluoro-adenosine-3'-phosphate
  modified_base 10: mod_base = OTHER; note = 2'-O-methyl-uridine-3'-phosphate
  modified_base 11: mod_base = OTHER; note = 2'-O-methyl-cytidine-3'-phosphate
  modified_base 12: mod_base = OTHER; note = 2'-O-methyl-uridine-3'-phosphate
  modified_base 13: mod_base = OTHER; note = 2'-O-methyl-guanosine-3'-phosphate
  modified_base 14: mod_base = OTHER; note = 2'-O-methyl-uridine-3'-phosphate
  modified_base 15: mod_base = OTHER; note = 2'-O-methyl-cytidine-3'-phosphate
  modified_base 16: mod_base = OTHER; note = 2'-O-methyl-adenosine-3'-phosphate
  modified_base 17: mod_base = OTHER; note = 2'-O-methyl-uridine-3'-phosphate
  modified_base 18: mod_base = OTHER; note = 2'-O-methyl-cytidine-3'-phosphate
  modified_base 19: mod_base = OTHER; note = 2'-O-methyl-adenosine-3'-phosphate
agcttaaaatctgtcatca

SEQ ID NO: 1680 - RNA, 19 nt, synthetic construct
  source 1..19: mol_type = other RNA
  modified_base 1: mod_base = OTHER; note = 2'-O-methyl-guanosine-3'-phosphorothioate
  modified_base 2: mod_base = OTHER; note = 2'-O-methyl-cytidine-3'-phosphorothioate
  modified_base 3: mod_base = OTHER; note = 2'-O-methyl-uridine-3'-phosphate
  modified_base 4: mod_base = OTHER; note = 2'-O-methyl-uridine-3'-phosphate
  modified_base 5: mod_base = OTHER; note = 2'-deoxy-2'-fluoro-adenosine-3'-phosphate
  modified_base 6: mod_base = OTHER; note = 2'-O-methyl-adenosine-3'-phosphate
  modified_base 7: mod_base = OTHER; note = 2'-deoxy-2'-fluoro-adenosine-3'-phosphate
  modified_base 8: mod_base = OTHER; note = 2'-deoxy-2'-fluoro-adenosine-3'-phosphate
  modified_base 9: mod_base = OTHER; note = 2'-deoxy-2'-fluoro-uridine-3'-phosphate
  modified_base 10: mod_base = OTHER; note = 2'-O-methyl-cytidine-3'-phosphate
  modified_base 11: mod_base = OTHER; note = 2'-O-methyl-uridine-3'-phosphate
  modified_base 12: mod_base = OTHER; note = 2'-O-methyl-guanosine-3'-phosphate
  modified_base 13: mod_base = OTHER; note = 2'-O-methyl-uridine-3'-phosphate
  modified_base 14: mod_base = OTHER; note = 2'-O-methyl-cytidine-3'-phosphate
  modified_base 15: mod_base = OTHER; note = 2'-O-methyl-adenosine-3'-phosphate
  modified_base 16: mod_base = OTHER; note = 2'-O-methyl-uridine-3'-phosphate
  modified_base 17: mod_base = OTHER; note = 2'-O-methyl-cytidine-3'-phosphate
  modified_base 18: mod_base = OTHER; note = 2'-O-methyl-cytidine-3'-phosphate
  modified_base 19: mod_base = OTHER; note = 2'-O-methyl-adenosine-3'-phosphate
gcttaaaatctgtcatcca

SEQ ID NO: 1681 - RNA, 19 nt, synthetic construct
  source 1..19: mol_type = other RNA
  modified_base 1: mod_base = OTHER; note = 2'-O-methyl-uridine-3'-phosphorothioate
  modified_base 2: mod_base = OTHER; note = 2'-O-methyl-adenosine-3'-phosphorothioate
  modified_base 3: mod_base = OTHER; note = 2'-O-methyl-adenosine-3'-phosphate
  modified_base 4: mod_base = OTHER; note = 2'-O-methyl-cytidine-3'-phosphate
  modified_base 5: mod_base = OTHER; note = 2'-deoxy-2'-fluoro-adenosine-3'-phosphate
  modified_base 6: mod_base = OTHER; note = 2'-O-methyl-guanosine-3'-phosphate
  modified_base 7: mod_base = OTHER; note = 2'-deoxy-2'-fluoro-adenosine-3'-phosphate
  modified_base 8: mod_base = OTHER; note = 2'-deoxy-2'-fluoro-cytidine-3'-phosphate
  modified_base 9: mod_base = OTHER; note = 2'-deoxy-2'-fluoro-cytidine-3'-phosphate
  modified_base 10: mod_base = OTHER; note = 2'-O-methyl-adenosine-3'-phosphate
  modified_base 11: mod_base = OTHER; note = 2'-O-methyl-cytidine-3'-phosphate
  modified_base 12: mod_base = OTHER; note = 2'-O-methyl-uridine-3'-phosphate
  modified_base 13: mod_base = OTHER; note = 2'-O-methyl-uridine-3'-phosphate
  modified_base 14: mod_base = OTHER; note = 2'-O-methyl-cytidine-3'-phosphate
  modified_base 15: mod_base = OTHER; note = 2'-O-methyl-cytidine-3'-phosphate
  modified_base 16: mod_base = OTHER; note = 2'-O-methyl-uridine-3'-phosphate
  modified_base 17: mod_base = OTHER; note = 2'-O-methyl-guanosine-3'-phosphate
  modified_base 18: mod_base = OTHER; note = 2'-O-methyl-adenosine-3'-phosphate
  modified_base 19: mod_base = OTHER; note = 2'-O-methyl-adenosine-3'-phosphate
taacagaccacttcctgaa

SEQ ID NO: 1682 - RNA, 19 nt, synthetic construct
  source 1..19: mol_type = other RNA
  modified_base 1: mod_base = OTHER; note = 2'-O-methyl-adenosine-3'-phosphorothioate
  modified_base 2: mod_base = OTHER; note = 2'-O-methyl-cytidine-3'-phosphorothioate
  modified_base 3: mod_base = OTHER; note = 2'-O-methyl-adenosine-3'-phosphate
  modified_base 4: mod_base = OTHER; note = 2'-O-methyl-guanosine-3'-phosphate
  modified_base 5: mod_base = OTHER; note = 2'-deoxy-2'-fluoro-adenosine-3'-phosphate
  modified_base 6: mod_base = OTHER; note = 2'-O-methyl-cytidine-3'-phosphate
  modified_base 7: mod_base = OTHER; note = 2'-deoxy-2'-fluoro-cytidine-3'-phosphate
  modified_base 8: mod_base = OTHER; note = 2'-deoxy-2'-fluoro-adenosine-3'-phosphate
  modified_base 9: mod_base = OTHER; note = 2'-deoxy-2'-fluoro-cytidine-3'-phosphate
  modified_base 10: mod_base = OTHER; note = 2'-O-methyl-uridine-3'-phosphate
  modified_base 11: mod_base = OTHER; note = 2'-O-methyl-uridine-3'-phosphate
  modified_base 12: mod_base = OTHER; note = 2'-O-methyl-cytidine-3'-phosphate
  modified_base 13: mod_base = OTHER; note = 2'-O-methyl-cytidine-3'-phosphate
  modified_base 14: mod_base = OTHER; note = 2'-O-methyl-uridine-3'-phosphate
  modified_base 15: mod_base = OTHER; note = 2'-O-methyl-guanosine-3'-phosphate
  modified_base 16: mod_base = OTHER; note = 2'-O-methyl-adenosine-3'-phosphate
  modified_base 17: mod_base = OTHER; note = 2'-O-methyl-guanosine-3'-phosphate
  modified_base 18: mod_base = OTHER; note = 2'-O-methyl-uridine-3'-phosphate
  modified_base 19: mod_base = OTHER; note = 2'-O-methyl-adenosine-3'-phosphate
acagaccacttcctgagta

SEQ ID NO: 1683 - RNA, 19 nt, synthetic construct
  source 1..19: mol_type = other RNA
  modified_base 1: mod_base = OTHER; note = 2'-O-methyl-cytidine-3'-phosphorothioate
  modified_base 2: mod_base = OTHER; note = 2'-O-methyl-adenosine-3'-phosphorothioate
  modified_base 3: mod_base = OTHER; note = 2'-O-methyl-guanosine-3'-phosphate
  modified_base 4: mod_base = OTHER; note = 2'-O-methyl-adenosine-3'-phosphate
  modified_base 5: mod_base = OTHER; note = 2'-deoxy-2'-fluoro-cytidine-3'-phosphate
  modified_base 6: mod_base = OTHER; note = 2'-O-methyl-cytidine-3'-phosphate
  modified_base 7: mod_base = OTHER; note = 2'-deoxy-2'-fluoro-adenosine-3'-phosphate
  modified_base 8: mod_base = OTHER; note = 2'-deoxy-2'-fluoro-cytidine-3'-phosphate
  modified_base 9: mod_base = OTHER; note = 2'-deoxy-2'-fluoro-uridine-3'-phosphate
  modified_base 10: mod_base = OTHER; note = 2'-O-methyl-uridine-3'-phosphate
  modified_base 11: mod_base = OTHER; note = 2'-O-methyl-cytidine-3'-phosphate
  modified_base 12: mod_base = OTHER; note = 2'-O-methyl-cytidine-3'-phosphate
  modified_base 13: mod_base = OTHER; note = 2'-O-methyl-uridine-3'-phosphate
  modified_base 14: mod_base = OTHER; note = 2'-O-methyl-guanosine-3'-phosphate
  modified_base 15: mod_base = OTHER; note = 2'-O-methyl-adenosine-3'-phosphate
  modified_base 16: mod_base = OTHER; note = 2'-O-methyl-guanosine-3'-phosphate
  modified_base 17: mod_base = OTHER; note = 2'-O-methyl-uridine-3'-phosphate
  modified_base 18: mod_base = OTHER; note = 2'-O-methyl-adenosine-3'-phosphate
  modified_base 19: mod_base = OTHER; note = 2'-O-methyl-adenosine-3'-phosphate
cagaccacttcctgagtaa

SEQ ID NO: 1684 - RNA, 19 nt, synthetic construct
  source 1..19: mol_type = other RNA
  modified_base 1: mod_base = OTHER; note = 2'-O-methyl-adenosine-3'-phosphorothioate
  modified_base 2: mod_base = OTHER; note = 2'-O-methyl-guanosine-3'-phosphorothioate
  modified_base 3: mod_base = OTHER; note = 2'-O-methyl-adenosine-3'-phosphate
  modified_base 4: mod_base = OTHER; note = 2'-O-methyl-cytidine-3'-phosphate
  modified_base 5: mod_base = OTHER; note = 2'-deoxy-2'-fluoro-cytidine-3'-phosphate
  modified_base 6: mod_base = OTHER; note = 2'-O-methyl-adenosine-3'-phosphate
  modified_base 7: mod_base = OTHER; note = 2'-deoxy-2'-fluoro-cytidine-3'-phosphate
  modified_base 8: mod_base = OTHER; note = 2'-deoxy-2'-fluoro-uridine-3'-phosphate
  modified_base 9: mod_base = OTHER; note = 2'-deoxy-2'-fluoro-uridine-3'-phosphate
  modified_base 10: mod_base = OTHER; note = 2'-O-methyl-cytidine-3'-phosphate
  modified_base 11: mod_base = OTHER; note = 2'-O-methyl-cytidine-3'-phosphate
  modified_base 12: mod_base = OTHER; note = 2'-O-methyl-uridine-3'-phosphate
  modified_base 13: mod_base = OTHER; note = 2'-O-methyl-guanosine-3'-phosphate
  modified_base 14: mod_base = OTHER; note = 2'-O-methyl-adenosine-3'-phosphate
  modified_base 15: mod_base = OTHER; note = 2'-O-methyl-guanosine-3'-phosphate
  modified_base 16: mod_base = OTHER; note = 2'-O-methyl-uridine-3'-phosphate
  modified_base 17: mod_base = OTHER; note = 2'-O-methyl-adenosine-3'-phosphate
  modified_base 18: mod_base = OTHER; note = 2'-O-methyl-guanosine-3'-phosphate
  modified_base 19: mod_base = OTHER; note = 2'-O-methyl-adenosine-3'-phosphate
agaccacttcctgagtaga

SEQ ID NO: 1685 - RNA, 19 nt, synthetic construct
  source 1..19: mol_type = other RNA
  modified_base 1: mod_base = OTHER; note = 2'-O-methyl-guanosine-3'-phosphorothioate
  modified_base 2: mod_base = OTHER; note = 2'-O-methyl-adenosine-3'-phosphorothioate
  modified_base 3: mod_base = OTHER; note = 2'-O-methyl-cytidine-3'-phosphate
  modified_base 4: mod_base = OTHER; note = 2'-O-methyl-cytidine-3'-phosphate
  modified_base 5: mod_base = OTHER; note = 2'-deoxy-2'-fluoro-adenosine-3'-phosphate
  modified_base 6: mod_base = OTHER; note = 2'-O-methyl-cytidine-3'-phosphate
  modified_base 7: mod_base = OTHER; note = 2'-deoxy-2'-fluoro-uridine-3'-phosphate
  modified_base 8: mod_base = OTHER; note = 2'-deoxy-2'-fluoro-uridine-3'-phosphate
  modified_base 9: mod_base = OTHER; note = 2'-deoxy-2'-fluoro-cytidine-3'-phosphate
  modified_base 10: mod_base = OTHER; note = 2'-O-methyl-cytidine-3'-phosphate
  modified_base 11: mod_base = OTHER; note = 2'-O-methyl-uridine-3'-phosphate
  modified_base 12: mod_base = OTHER; note = 2'-O-methyl-guanosine-3'-phosphate
  modified_base 13: mod_base = OTHER; note = 2'-O-methyl-adenosine-3'-phosphate
  modified_base 14: mod_base = OTHER; note = 2'-O-methyl-guanosine-3'-phosphate
  modified_base 15: mod_base = OTHER; note = 2'-O-methyl-uridine-3'-phosphate
  modified_base 16: mod_base = OTHER; note = 2'-O-methyl-adenosine-3'-phosphate
  modified_base 17: mod_base = OTHER; note = 2'-O-methyl-guanosine-3'-phosphate
  modified_base 18: mod_base = OTHER; note = 2'-O-methyl-adenosine-3'-phosphate
  modified_base 19: mod_base = OTHER; note = 2'-O-methyl-adenosine-3'-phosphate
gaccacttcctgagtagaa

SEQ ID NO: 1686 - RNA, 19 nt, synthetic construct
  source 1..19: mol_type = other RNA
  modified_base 1: mod_base = OTHER; note = 2'-O-methyl-uridine-3'-phosphorothioate
  modified_base 2: mod_base = OTHER; note = 2'-O-methyl-uridine-3'-phosphorothioate
  modified_base 3: mod_base = OTHER; note = 2'-O-methyl-cytidine-3'-phosphate
  modified_base 4: mod_base = OTHER; note = 2'-O-methyl-cytidine-3'-phosphate
  modified_base 5: mod_base = OTHER; note = 2'-deoxy-2'-fluoro-uridine-3'-phosphate
  modified_base 6: mod_base = OTHER; note = 2'-O-methyl-guanosine-3'-phosphate
  modified_base 7: mod_base = OTHER; note = 2'-deoxy-2'-fluoro-adenosine-3'-phosphate
  modified_base 8: mod_base = OTHER; note = 2'-deoxy-2'-fluoro-guanosine-3'-phosphate
  modified_base 9: mod_base = OTHER; note = 2'-deoxy-2'-fluoro-uridine-3'-phosphate
  modified_base 10: mod_base = OTHER; note = 2'-O-methyl-adenosine-3'-phosphate
  modified_base 11: mod_base = OTHER; note = 2'-O-methyl-guanosine-3'-phosphate
  modified_base 12: mod_base = OTHER; note = 2'-O-methyl-adenosine-3'-phosphate
  modified_base 13: mod_base = OTHER; note = 2'-O-methyl-adenosine-3'-phosphate
  modified_base 14: mod_base = OTHER; note = 2'-O-methyl-guanosine-3'-phosphate
  modified_base 15: mod_base = OTHER; note = 2'-O-methyl-adenosine-3'-phosphate
  modified_base 16: mod_base = OTHER; note = 2'-O-methyl-guanosine-3'-phosphate
  modified_base 17: mod_base = OTHER; note = 2'-O-methyl-uridine-3'-phosphate
  modified_base 18: mod_base = OTHER; note = 2'-O-methyl-uridine-3'-phosphate
  modified_base 19: mod_base = OTHER; note = 2'-O-methyl-adenosine-3'-phosphate
ttcctgagtagaagagtta

SEQ ID NO: 1687 - RNA, 19 nt, synthetic construct
  source 1..19: mol_type = other RNA
  modified_base 1: mod_base = OTHER; note = 2'-O-methyl-uridine-3'-phosphorothioate
  modified_base 2: mod_base = OTHER; note = 2'-O-methyl-uridine-3'-phosphorothioate
  modified_base 3: mod_base = OTHER; note = 2'-O-methyl-uridine-3'-phosphate
  modified_base 4: mod_base = OTHER; note = 2'-O-methyl-guanosine-3'-phosphate
  modified_base 5: mod_base = OTHER; note = 2'-deoxy-2'-fluoro-uridine-3'-phosphate
  modified_base 6: mod_base = OTHER; note = 2'-O-methyl-guanosine-3'-phosphate
  modified_base 7: mod_base = OTHER; note = 2'-deoxy-2'-fluoro-adenosine-3'-phosphate
  modified_base 8: mod_base = OTHER; note = 2'-deoxy-2'-fluoro-adenosine-3'-phosphate
  modified_base 9: mod_base = OTHER; note = 2'-deoxy-2'-fluoro-adenosine-3'-phosphate
  modified_base 10: mod_base = OTHER; note = 2'-O-methyl-adenosine-3'-phosphate
  modified_base 11: mod_base = OTHER; note = 2'-O-methyl-guanosine-3'-phosphate
  modified_base 12: mod_base = OTHER; note = 2'-O-methyl-guanosine-3'-phosphate
  modified_base 13: mod_base = OTHER; note = 2'-O-methyl-uridine-3'-phosphate
  modified_base 14: mod_base = OTHER; note = 2'-O-methyl-cytidine-3'-phosphate
  modified_base 15: mod_base = OTHER; note = 2'-O-methyl-adenosine-3'-phosphate
  modified_base 16: mod_base = OTHER; note = 2'-O-methyl-adenosine-3'-phosphate
  modified_base 17: mod_base = OTHER; note = 2'-O-methyl-guanosine-3'-phosphate
  modified_base 18: mod_base = OTHER; note = 2'-O-methyl-adenosine-3'-phosphate
  modified_base 19: mod_base = OTHER; note = 2'-O-methyl-adenosine-3'-phosphate
tttgtgaaaaggtcaagaa

SEQ ID NO: 1688 - RNA, 19 nt, synthetic construct
  source 1..19: mol_type = other RNA
  modified_base 1: mod_base = OTHER; note = 2'-O-methyl-guanosine-3'-phosphorothioate
  modified_base 2: mod_base = OTHER; note = 2'-O-methyl-uridine-3'-phosphorothioate
  modified_base 3: mod_base = OTHER; note = 2'-O-methyl-guanosine-3'-phosphate
  modified_base 4: mod_base = OTHER; note = 2'-O-methyl-adenosine-3'-phosphate
  modified_base 5: mod_base = OTHER; note = 2'-deoxy-2'-fluoro-adenosine-3'-phosphate
  modified_base 6: mod_base = OTHER; note = 2'-O-methyl-adenosine-3'-phosphate
  modified_base 7: mod_base = OTHER; note = 2'-deoxy-2'-fluoro-adenosine-3'-phosphate
  modified_base 8: mod_base = OTHER; note = 2'-deoxy-2'-fluoro-guanosine-3'-phosphate
  modified_base 9: mod_base = OTHER; note = 2'-deoxy-2'-fluoro-guanosine-3'-phosphate
  modified_base 10: mod_base = OTHER; note = 2'-O-methyl-uridine-3'-phosphate
  modified_base 11: mod_base = OTHER; note = 2'-O-methyl-cytidine-3'-phosphate
  modified_base 12: mod_base = OTHER; note = 2'-O-methyl-adenosine-3'-phosphate
  modified_base 13: mod_base = OTHER; note = 2'-O-methyl-adenosine-3'-phosphate
  modified_base 14: mod_base = OTHER; note = 2'-O-methyl-guanosine-3'-phosphate
  modified_base 15: mod_base = OTHER; note = 2'-O-methyl-adenosine-3'-phosphate
  modified_base 16: mod_base = OTHER; note = 2'-O-methyl-uridine-3'-phosphate
  modified_base 17: mod_base = OTHER; note = 2'-O-methyl-uridine-3'-phosphate
  modified_base 18: mod_base = OTHER; note = 2'-O-methyl-adenosine-3'-phosphate
  modified_base 19: mod_base = OTHER; note = 2'-O-methyl-adenosine-3'-phosphate
gtgaaaaggtcaagattaa

SEQ ID NO: 1689 - RNA, 19 nt, synthetic construct
  source 1..19: mol_type = other RNA
  modified_base 1: mod_base = OTHER; note = 2'-O-methyl-uridine-3'-phosphorothioate
  modified_base 2: mod_base = OTHER; note = 2'-O-methyl-guanosine-3'-phosphorothioate
  modified_base 3: mod_base = OTHER; note = 2'-O-methyl-adenosine-3'-phosphate
  modified_base 4: mod_base = OTHER; note = 2'-O-methyl-adenosine-3'-phosphate
  modified_base 5: mod_base = OTHER; note = 2'-deoxy-2'-fluoro-adenosine-3'-phosphate
  modified_base 6: mod_base = OTHER; note = 2'-O-methyl-adenosine-3'-phosphate
  modified_base 7: mod_base = OTHER; note = 2'-deoxy-2'-fluoro-guanosine-3'-phosphate
  modified_base 8: mod_base = OTHER; note = 2'-deoxy-2'-fluoro-guanosine-3'-phosphate
  modified_base 9: mod_base = OTHER; note = 2'-deoxy-2'-fluoro-uridine-3'-phosphate
  modified_base 10: mod_base = OTHER; note = 2'-O-methyl-cytidine-3'-phosphate
  modified_base 11: mod_base = OTHER; note = 2'-O-methyl-adenosine-3'-phosphate
  modified_base 12: mod_base = OTHER; note = 2'-O-methyl-adenosine-3'-phosphate
  modified_base 13: mod_base = OTHER; note = 2'-O-methyl-guanosine-3'-phosphate
  modified_base 14: mod_base = OTHER; note = 2'-O-methyl-adenosine-3'-phosphate
  modified_base 15: mod_base = OTHER; note = 2'-O-methyl-uridine-3'-phosphate
  modified_base 16: mod_base = OTHER; note = 2'-O-methyl-uridine-3'-phosphate
  modified_base 17: mod_base = OTHER; note = 2'-O-methyl-adenosine-3'-phosphate
  modified_base 18: mod_base = OTHER; note = 2'-O-methyl-adenosine-3'-phosphate
  modified_base 19: mod_base = OTHER; note = 2'-O-methyl-adenosine-3'-phosphate
tgaaaaggtcaagattaaa

SEQ ID NO: 1690 - RNA, 19 nt, synthetic construct
  source 1..19: mol_type = other RNA
  modified_base 1: mod_base = OTHER; note = 2'-O-methyl-guanosine-3'-phosphorothioate
  modified_base 2: mod_base = OTHER; note = 2'-O-methyl-adenosine-3'-phosphorothioate
  modified_base 3: mod_base = OTHER; note = 2'-O-methyl-adenosine-3'-phosphate
  modified_base 4: mod_base = OTHER; note = 2'-O-methyl-adenosine-3'-phosphate
  modified_base 5: mod_base = OTHER; note = 2'-deoxy-2'-fluoro-adenosine-3'-phosphate
  modified_base 6: mod_base = OTHER; note = 2'-O-methyl-guanosine-3'-phosphate
  modified_base 7: mod_base = OTHER; note = 2'-deoxy-2'-fluoro-guanosine-3'-phosphate
  modified_base 8: mod_base = OTHER; note = 2'-deoxy-2'-fluoro-uridine-3'-phosphate
  modified_base 9: mod_base = OTHER; note = 2'-deoxy-2'-fluoro-cytidine-3'-phosphate
  modified_base 10: mod_base = OTHER; note = 2'-O-methyl-adenosine-3'-phosphate
  modified_base 11: mod_base = OTHER; note = 2'-O-methyl-adenosine-3'-phosphate
  modified_base 12: mod_base = OTHER; note = 2'-O-methyl-guanosine-3'-phosphate
  modified_base 13: mod_base = OTHER; note = 2'-O-methyl-adenosine-3'-phosphate
  modified_base 14: mod_base = OTHER; note = 2'-O-methyl-uridine-3'-phosphate
  modified_base 15: mod_base = OTHER; note = 2'-O-methyl-uridine-3'-phosphate
  modified_base 16: mod_base = OTHER; note = 2'-O-methyl-adenosine-3'-phosphate
  modified_base 17: mod_base = OTHER; note = 2'-O-methyl-adenosine-3'-phosphate
  modified_base 18: mod_base = OTHER; note = 2'-O-methyl-guanosine-3'-phosphate
  modified_base 19: mod_base = OTHER; note = 2'-O-methyl-adenosine-3'-phosphate
gaaaaggtcaagattaaga

SEQ ID NO: 1691 - RNA, 19 nt, synthetic construct
  source 1..19: mol_type = other RNA
  modified_base 1: mod_base = OTHER; note = 2'-O-methyl-uridine-3'-phosphorothioate
  modified_base 2: mod_base = OTHER; note = 2'-O-methyl-uridine-3'-phosphorothioate
  modified_base 3: mod_base = OTHER; note = 2'-O-methyl-guanosine-3'-phosphate
  modified_base 4: mod_base = OTHER; note = 2'-O-methyl-guanosine-3'-phosphate
  modified_base 5: mod_base = OTHER; note = 2'-deoxy-2'-fluoro-adenosine-3'-phosphate
  modified_base 6: mod_base = OTHER; note = 2'-O-methyl-uridine-3'-phosphate
  modified_base 7: mod_base = OTHER; note = 2'-deoxy-2'-fluoro-cytidine-3'-phosphate
  modified_base 8: mod_base = OTHER; note = 2'-deoxy-2'-fluoro-uridine-3'-phosphate
  modified_base 9: mod_base = OTHER; note = 2'-deoxy-2'-fluoro-uridine-3'-phosphate
  modified_base 10: mod_base = OTHER; note = 2'-O-methyl-guanosine-3'-phosphate
  modified_base 11: mod_base = OTHER; note = 2'-O-methyl-uridine-3'-phosphate
  modified_base 12: mod_base = OTHER; note = 2'-O-methyl-adenosine-3'-phosphate
  modified_base 13: mod_base = OTHER; note = 2'-O-methyl-adenosine-3'-phosphate
  modified_base 14: mod_base = OTHER; note = 2'-O-methyl-adenosine-3'-phosphate
  modified_base 15: mod_base = OTHER; note = 2'-O-methyl-cytidine-3'-phosphate
  modified_base 16: mod_base = OTHER; note = 2'-O-methyl-adenosine-3'-phosphate
  modified_base 17: mod_base = OTHER; note = 2'-O-methyl-uridine-3'-phosphate
  modified_base 18: mod_base = OTHER; note = 2'-O-methyl-guanosine-3'-phosphate
  modified_base 19: mod_base = OTHER; note = 2'-O-methyl-adenosine-3'-phosphate
ttggatcttgtaaacatga

SEQ ID NO: 1692 - RNA, 19 nt, synthetic construct
  source 1..19: mol_type = other RNA
  modified_base 1: mod_base = OTHER; note = 2'-O-methyl-uridine-3'-phosphorothioate
  modified_base 2: mod_base = OTHER; note = 2'-O-methyl-guanosine-3'-phosphorothioate
  modified_base 3: mod_base = OTHER; note = 2'-O-methyl-guanosine-3'-phosphate
  modified_base 4: mod_base = OTHER; note = 2'-O-methyl-adenosine-3'-phosphate
  modified_base 5: mod_base = OTHER; note = 2'-deoxy-2'-fluoro-uridine-3'-phosphate
  modified_base 6: mod_base = OTHER; note = 2'-O-methyl-cytidine-3'-phosphate
  modified_base 7: mod_base = OTHER; note = 2'-deoxy-2'-fluoro-uridine-3'-phosphate
  modified_base 8: mod_base = OTHER; note = 2'-deoxy-2'-fluoro-uridine-3'-phosphate
  modified_base 9: mod_base = OTHER; note = 2'-deoxy-2'-fluoro-guanosine-3'-phosphate
  modified_base 10: mod_base = OTHER; note = 2'-O-methyl-uridine-3'-phosphate
  modified_base 11: mod_base = OTHER; note = 2'-O-methyl-adenosine-3'-phosphate
  modified_base 12: mod_base = OTHER; note = 2'-O-methyl-adenosine-3'-phosphate
  modified_base 13: mod_base = OTHER; note = 2'-O-methyl-adenosine-3'-phosphate
  modified_base 14: mod_base = OTHER; note = 2'-O-methyl-cytidine-3'-phosphate
  modified_base 15: mod_base = OTHER; note = 2'-O-methyl-adenosine-3'-phosphate
  modified_base 16: mod_base = OTHER; note = 2'-O-methyl-uridine-3'-phosphate
  modified_base 17: mod_base = OTHER; note = 2'-O-methyl-guanosine-3'-phosphate
  modified_base 18: mod_base = OTHER; note = 2'-O-methyl-adenosine-3'-phosphate
  modified_base 19: mod_base = OTHER; note = 2'-O-methyl-adenosine-3'-phosphate
tggatcttgtaaacatgaa

SEQ ID NO: 1693 - RNA, 19 nt, synthetic construct
  source 1..19: mol_type = other RNA
  modified_base 1: mod_base = OTHER; note = 2'-O-methyl-uridine-3'-phosphorothioate
  modified_base 2: mod_base = OTHER; note = 2'-O-methyl-cytidine-3'-phosphorothioate
  modified_base 3: mod_base = OTHER; note = 2'-O-methyl-uridine-3'-phosphate
  modified_base 4: mod_base = OTHER; note = 2'-O-methyl-uridine-3'-phosphate
  modified_base 5: mod_base = OTHER; note = 2'-deoxy-2'-fluoro-guanosine-3'-phosphate
  modified_base 6: mod_base = OTHER; note = 2'-O-methyl-uridine-3'-phosphate
  modified_base 7: mod_base = OTHER; note = 2'-deoxy-2'-fluoro-adenosine-3'-phosphate
  modified_base 8: mod_base = OTHER; note = 2'-deoxy-2'-fluoro-adenosine-3'-phosphate
  modified_base 9: mod_base = OTHER; note = 2'-deoxy-2'-fluoro-adenosine-3'-phosphate
  modified_base 10: mod_base = OTHER; note = 2'-O-methyl-cytidine-3'-phosphate
  modified_base 11: mod_base = OTHER; note = 2'-O-methyl-adenosine-3'-phosphate
  modified_base 12: mod_base = OTHER; note = 2'-O-methyl-uridine-3'-phosphate
  modified_base 13: mod_base = OTHER; note = 2'-O-methyl-guanosine-3'-phosphate
  modified_base 14: mod_base = OTHER; note = 2'-O-methyl-adenosine-3'-phosphate
  modified_base 15: mod_base = OTHER; note = 2'-O-methyl-adenosine-3'-phosphate
  modified_base 16: mod_base = OTHER; note = 2'-O-methyl-adenosine-3'-phosphate
  modified_base 17: mod_base = OTHER; note = 2'-O-methyl-adenosine-3'-phosphate
  modified_base 18: mod_base = OTHER; note = 2'-O-methyl-guanosine-3'-phosphate
  modified_base 19: mod_base = OTHER; note = 2'-O-methyl-adenosine-3'-phosphate
tcttgtaaacatgaaaaga

SEQ ID NO: 1694 - RNA, 19 nt, synthetic construct
  source 1..19: mol_type = other RNA
  modified_base 1: mod_base = OTHER; note = 2'-O-methyl-cytidine-3'-phosphorothioate
  modified_base 2: mod_base = OTHER; note = 2'-O-methyl-uridine-3'-phosphorothioate
  modified_base 3: mod_base = OTHER; note = 2'-O-methyl-uridine-3'-phosphate
  modified_base 4: mod_base = OTHER; note = 2'-O-methyl-guanosine-3'-phosphate
  modified_base 5: mod_base = OTHER; note = 2'-deoxy-2'-fluoro-uridine-3'-phosphate
  modified_base 6: mod_base = OTHER; note = 2'-O-methyl-adenosine-3'-phosphate
  modified_base 7: mod_base = OTHER; note = 2'-deoxy-2'-fluoro-adenosine-3'-phosphate
  modified_base 8: mod_base = OTHER; note = 2'-deoxy-2'-fluoro-adenosine-3'-phosphate
  modified_base 9: mod_base = OTHER; note = 2'-deoxy-2'-fluoro-cytidine-3'-phosphate
  modified_base 10: mod_base = OTHER; note = 2'-O-methyl-adenosine-3'-phosphate
  modified_base 11: mod_base = OTHER; note = 2'-O-methyl-uridine-3'-phosphate
  modified_base 12: mod_base = OTHER; note = 2'-O-methyl-guanosine-3'-phosphate
  modified_base 13: mod_base = OTHER; note = 2'-O-methyl-adenosine-3'-phosphate
  modified_base 14: mod_base = OTHER; note = 2'-O-methyl-adenosine-3'-phosphate
  modified_base 15: mod_base = OTHER; note = 2'-O-methyl-adenosine-3'-phosphate
  modified_base 16: mod_base = OTHER; note = 2'-O-methyl-adenosine-3'-phosphate
  modified_base 17: mod_base = OTHER; note = 2'-O-methyl-guanosine-3'-phosphate
  modified_base 18: mod_base = OTHER; note = 2'-O-methyl-guanosine-3'-phosphate
  modified_base 19: mod_base = OTHER; note = 2'-O-methyl-adenosine-3'-phosphate
cttgtaaacatgaaaagga

SEQ ID NO: 1695 - RNA, 19 nt, synthetic construct
  source 1..19: mol_type = other RNA
  modified_base 1: mod_base = OTHER; note = 2'-O-methyl-uridine-3'-phosphorothioate
  modified_base 2: mod_base = OTHER; note = 2'-O-methyl-uridine-3'-phosphorothioate
  modified_base 3: mod_base = OTHER; note = 2'-O-methyl-guanosine-3'-phosphate
  modified_base 4: mod_base = OTHER; note = 2'-O-methyl-uridine-3'-phosphate
  modified_base 5: mod_base = OTHER; note = 2'-deoxy-2'-fluoro-adenosine-3'-phosphate
  modified_base 6: mod_base = OTHER; note = 2'-O-methyl-adenosine-3'-phosphate
  modified_base 7: mod_base = OTHER; note = 2'-deoxy-2'-fluoro-adenosine-3'-phosphate
  modified_base 8: mod_base = OTHER; note = 2'-deoxy-2'-fluoro-cytidine-3'-phosphate
  modified_base 9: mod_base = OTHER; note = 2'-deoxy-2'-fluoro-adenosine-3'-phosphate
  modified_base 10: mod_base = OTHER; note = 2'-O-methyl-uridine-3'-phosphate
  modified_base 11: mod_base = OTHER; note = 2'-O-methyl-guanosine-3'-phosphate
  modified_base 12: mod_base = OTHER; note = 2'-O-methyl-adenosine-3'-phosphate
  modified_base 13: mod_base = OTHER; note = 2'-O-methyl-adenosine-3'-phosphate
  modified_base 14: mod_base = OTHER; note = 2'-O-methyl-adenosine-3'-phosphate
  modified_base 15: mod_base = OTHER; note = 2'-O-methyl-adenosine-3'-phosphate
  modified_base 16: mod_base = OTHER; note = 2'-O-methyl-guanosine-3'-phosphate
  modified_base 17: mod_base = OTHER; note = 2'-O-methyl-guanosine-3'-phosphate
  modified_base 18: mod_base = OTHER; note = 2'-O-methyl-guanosine-3'-phosphate
  modified_base 19: mod_base = OTHER; note = 2'-O-methyl-adenosine-3'-phosphate
ttgtaaacatgaaaaggga

SEQ ID NO: 1696 - RNA, 19 nt, synthetic construct
  source 1..19: mol_type = other RNA
  modified_base 1: mod_base = OTHER; note = 2'-O-methyl-adenosine-3'-phosphorothioate
  modified_base 2: mod_base = OTHER; note = 2'-O-methyl-adenosine-3'-phosphorothioate
  modified_base 3: mod_base = OTHER; note = 2'-O-methyl-adenosine-3'-phosphate
  modified_base 4: mod_base = OTHER; note = 2'-O-methyl-cytidine-3'-phosphate
  modified_base 5: mod_base = OTHER; note = 2'-deoxy-2'-fluoro-adenosine-3'-phosphate
  modified_base 6: mod_base = OTHER; note = 2'-O-methyl-uridine-3'-phosphate
  modified_base 7: mod_base = OTHER; note = 2'-deoxy-2'-fluoro-guanosine-3'-phosphate
  modified_base 8: mod_base = OTHER; note = 2'-deoxy-2'-fluoro-adenosine-3'-phosphate
  modified_base 9: mod_base = OTHER; note = 2'-deoxy-2'-fluoro-adenosine-3'-phosphate
  modified_base 10: mod_base = OTHER; note = 2'-O-methyl-adenosine-3'-phosphate
  modified_base 11: mod_base = OTHER; note = 2'-O-methyl-adenosine-3'-phosphate
  modified_base 12: mod_base = OTHER; note = 2'-O-methyl-guanosine-3'-phosphate
  modified_base 13: mod_base = OTHER; note = 2'-O-methyl-guanosine-3'-phosphate
  modified_base 14: mod_base = OTHER; note = 2'-O-methyl-guanosine-3'-phosphate
  modified_base 15: mod_base = OTHER; note = 2'-O-methyl-cytidine-3'-phosphate
  modified_base 16: mod_base = OTHER; note = 2'-O-methyl-uridine-3'-phosphate
  modified_base 17: mod_base = OTHER; note = 2'-O-methyl-uridine-3'-phosphate
  modified_base 18: mod_base = OTHER; note = 2'-O-methyl-uridine-3'-phosphate
  modified_base 19: mod_base = OTHER; note = 2'-O-methyl-adenosine-3'-phosphate
aaacatgaaaagggcttta

SEQ ID NO: 1697 - RNA, 19 nt, synthetic construct
  source 1..19: mol_type = other RNA
  modified_base 1: mod_base = OTHER; note = 2'-O-methyl-adenosine-3'-phosphorothioate
  modified_base 2: mod_base = OTHER; note = 2'-O-methyl-adenosine-3'-phosphorothioate
  modified_base 3: mod_base = OTHER; note = 2'-O-methyl-cytidine-3'-phosphate
  modified_base 4: mod_base = OTHER; note = 2'-O-methyl-adenosine-3'-phosphate
  modified_base 5: mod_base = OTHER; note = 2'-deoxy-2'-fluoro-uridine-3'-phosphate
  modified_base 6: mod_base = OTHER; note = 2'-O-methyl-guanosine-3'-phosphate
  modified_base 7: mod_base = OTHER; note = 2'-deoxy-2'-fluoro-adenosine-3'-phosphate
  modified_base 8: mod_base = OTHER; note = 2'-deoxy-2'-fluoro-adenosine-3'-phosphate
  modified_base 9: mod_base = OTHER; note = 2'-deoxy-2'-fluoro-adenosine-3'-phosphate
  modified_base 10: mod_base = OTHER; note = 2'-O-methyl-adenosine-3'-phosphate
  modified_base 11: mod_base = OTHER; note = 2'-O-methyl-guanosine-3'-phosphate
  modified_base 12: mod_base = OTHER; note = 2'-O-methyl-guanosine-3'-phosphate
  modified_base 13: mod_base = OTHER; note = 2'-O-methyl-guanosine-3'-phosphate
  modified_base 14: mod_base = OTHER; note = 2'-O-methyl-cytidine-3'-phosphate
  modified_base 15: mod_base = OTHER; note = 2'-O-methyl-uridine-3'-phosphate
  modified_base 16: mod_base = OTHER; note = 2'-O-methyl-uridine-3'-phosphate
  modified_base 17: mod_base = OTHER; note = 2'-O-methyl-uridine-3'-phosphate
  modified_base 18: mod_base = OTHER; note = 2'-O-methyl-adenosine-3'-phosphate
  modified_base 19: mod_base = OTHER; note = 2'-O-methyl-adenosine-3'-phosphate
aacatgaaaagggctttaa

SEQ ID NO: 1698 - RNA, 19 nt, synthetic construct
  source 1..19: mol_type = other RNA
  modified_base 1: mod_base = OTHER; note = 2'-O-methyl-cytidine-3'-phosphorothioate
  modified_base 2: mod_base = OTHER; note = 2'-O-methyl-uridine-3'-phosphorothioate
  modified_base 3: mod_base = OTHER; note = 2'-O-methyl-adenosine-3'-phosphate
  modified_base 4: mod_base = OTHER; note = 2'-O-methyl-uridine-3'-phosphate
  modified_base 5: mod_base = OTHER; note = 2'-deoxy-2'-fluoro-cytidine-3'-phosphate
  modified_base 6: mod_base = OTHER; note = 2'-O-methyl-cytidine-3'-phosphate
  modified_base 7: mod_base = OTHER; note = 2'-deoxy-2'-fluoro-cytidine-3'-phosphate
  modified_base 8: mod_base = OTHER; note = 2'-deoxy-2'-fluoro-adenosine-3'-phosphate
  modified_base 9: mod_base = OTHER; note = 2'-deoxy-2'-fluoro-adenosine-3'-phosphate
  modified_base 10: mod_base = OTHER; note = 2'-O-methyl-adenosine-3'-phosphate
  modified_base 11: mod_base = OTHER; note = 2'-O-methyl-uridine-3'-phosphate
  modified_base 12: mod_base = OTHER; note = 2'-O-methyl-cytidine-3'-phosphate
  modified_base 13: mod_base = OTHER; note = 2'-O-methyl-uridine-3'-phosphate
  modified_base 14: mod_base = OTHER; note = 2'-O-methyl-uridine-3'-phosphate
  modified_base 15: mod_base = OTHER; note = 2'-O-methyl-uridine-3'-phosphate
  modified_base 16: mod_base = OTHER; note = 2'-O-methyl-uridine-3'-phosphate
  modified_base 17: mod_base = OTHER; note = 2'-O-methyl-cytidine-3'-phosphate
  modified_base 18: mod_base = OTHER; note = 2'-O-methyl-uridine-3'-phosphate
  modified_base 19: mod_base = OTHER; note = 2'-O-methyl-adenosine-3'-phosphate
ctatcccaaatcttttcta

SEQ ID NO: 1699 - RNA, 19 nt, synthetic construct
  source 1..19: mol_type = other RNA
  modified_base 1: mod_base = OTHER; note = 2'-O-methyl-adenosine-3'-phosphorothioate
  modified_base 2: mod_base = OTHER; note = 2'-O-methyl-uridine-3'-phosphorothioate
  modified_base 3: mod_base = OTHER; note = 2'-O-methyl-cytidine-3'-phosphate
  modified_base 4: mod_base = OTHER; note = 2'-O-methyl-cytidine-3'-phosphate
  modified_base 5: mod_base = OTHER; note = 2'-deoxy-2'-fluoro-cytidine-3'-phosphate
  modified_base 6: mod_base = OTHER; note = 2'-O-methyl-adenosine-3'-phosphate
  modified_base 7: mod_base = OTHER; note = 2'-deoxy-2'-fluoro-adenosine-3'-phosphate
  modified_base 8: mod_base = OTHER; note = 2'-deoxy-2'-fluoro-adenosine-3'-phosphate
  modified_base 9: mod_base = OTHER; note = 2'-deoxy-2'-fluoro-uridine-3'-phosphate
  modified_base 10: mod_base = OTHER; note = 2'-O-methyl-cytidine-3'-phosphate
  modified_base 11: mod_base = OTHER; note = 2'-O-methyl-uridine-3'-phosphate
  modified_base 12: mod_base = OTHER; note = 2'-O-methyl-uridine-3'-phosphate
  modified_base 13: mod_base = OTHER; note = 2'-O-methyl-uridine-3'-phosphate
  modified_base 14: mod_base = OTHER; note = 2'-O-methyl-uridine-3'-phosphate
  modified_base 15: mod_base = OTHER; note = 2'-O-methyl-cytidine-3'-phosphate
  modified_base 16: mod_base = OTHER; note = 2'-O-methyl-uridine-3'-phosphate
  modified_base 17: mod_base = OTHER; note = 2'-O-methyl-guanosine-3'-phosphate
  modified_base 18: mod_base = OTHER; note = 2'-O-methyl-adenosine-3'-phosphate
  modified_base 19: mod_base = OTHER; note = 2'-O-methyl-adenosine-3'-phosphate
atcccaaatcttttctgaa

SEQ ID NO: 1700 - RNA, 19 nt, synthetic construct
  source 1..19: mol_type = other RNA
  modified_base 1: mod_base = OTHER; note = 2'-O-methyl-uridine-3'-phosphorothioate
  modified_base 2: mod_base = OTHER; note = 2'-O-methyl-cytidine-3'-phosphorothioate
  modified_base 3: mod_base = OTHER; note = 2'-O-methyl-cytidine-3'-phosphate
  modified_base 4: mod_base = OTHER; note = 2'-O-methyl-cytidine-3'-phosphate
  modified_base 5: mod_base = OTHER; note = 2'-deoxy-2'-fluoro-adenosine-3'-phosphate
  modified_base 6: mod_base = OTHER; note = 2'-O-methyl-adenosine-3'-phosphate
  modified_base 7: mod_base = OTHER; note = 2'-deoxy-2'-fluoro-adenosine-3'-phosphate
  modified_base 8: mod_base = OTHER; note = 2'-deoxy-2'-fluoro-uridine-3'-phosphate
  modified_base 9: mod_base = OTHER; note = 2'-deoxy-2'-fluoro-cytidine-3'-phosphate
  modified_base 10: mod_base = OTHER; note = 2'-O-methyl-uridine-3'-phosphate
  modified_base 11: mod_base = OTHER; note = 2'-O-methyl-uridine-3'-phosphate
  modified_base 12: mod_base = OTHER; note = 2'-O-methyl-uridine-3'-phosphate
  modified_base 13: mod_base = OTHER; note = 2'-O-methyl-uridine-3'-phosphate
  modified_base 14: mod_base = OTHER; note = 2'-O-methyl-cytidine-3'-phosphate
  modified_base 15: mod_base = OTHER; note = 2'-O-methyl-uridine-3'-phosphate
  modified_base 16: mod_base = OTHER; note = 2'-O-methyl-guanosine-3'-phosphate
  modified_base 17: mod_base = OTHER; note = 2'-O-methyl-adenosine-3'-phosphate
  modified_base 18: mod_base = OTHER; note = 2'-O-methyl-adenosine-3'-phosphate
  modified_base 19: mod_base = OTHER; note = 2'-O-methyl-adenosine-3'-phosphate
tcccaaatcttttctgaaa

SEQ ID NO: 1701 - RNA, 19 nt, synthetic construct
  source 1..19: mol_type = other RNA
  modified_base 1: mod_base = OTHER; note = 2'-O-methyl-cytidine-3'-phosphorothioate
  modified_base 2: mod_base = OTHER; note = 2'-O-methyl-uridine-3'-phosphorothioate
  modified_base 3: mod_base = OTHER; note = 2'-O-methyl-uridine-3'-phosphate
  modified_base 4: mod_base = OTHER; note = 2'-O-methyl-uridine-3'-phosphate
  modified_base 5: mod_base = OTHER; note = 2'-deoxy-2'-fluoro-uridine-3'-phosphate
  modified_base 6: mod_base = OTHER; note = 2'-O-methyl-cytidine-3'-phosphate
  modified_base 7: mod_base = OTHER; note = 2'-deoxy-2'-fluoro-uridine-3'-phosphate
  modified_base 8: mod_base = OTHER; note = 2'-deoxy-2'-fluoro-guanosine-3'-phosphate
  modified_base 9: mod_base = OTHER; note = 2'-deoxy-2'-fluoro-adenosine-3'-phosphate
  modified_base 10: mod_base = OTHER; note = 2'-O-methyl-adenosine-3'-phosphate
  modified_base 11: mod_base = OTHER; note = 2'-O-methyl-guanosine-3'-phosphate
  modified_base 12: mod_base = OTHER; note = 2'-O-methyl-adenosine-3'-phosphate
  modified_base 13: mod_base = OTHER; note = 2'-O-methyl-uridine-3'-phosphate
  modified_base 14: mod_base = OTHER; note = 2'-O-methyl-guanosine-3'-phosphate
  modified_base 15: mod_base = OTHER; note = 2'-O-methyl-adenosine-3'-phosphate
  modified_base 16: mod_base = OTHER; note = 2'-O-methyl-adenosine-3'-phosphate
  modified_base 17: mod_base = OTHER; note = 2'-O-methyl-guanosine-3'-phosphate
  modified_base 18: mod_base = OTHER; note = 2'-O-methyl-adenosine-3'-phosphate
  modified_base 19: mod_base = OTHER; note = 2'-O-methyl-adenosine-3'-phosphate
cttttctgaagatgaagaa

SEQ ID NO: 1702 - RNA, 19 nt, synthetic construct
  source 1..19: mol_type = other RNA
  modified_base 1: mod_base = OTHER; note = 2'-O-methyl-uridine-3'-phosphorothioate
  modified_base 2: mod_base = OTHER; note = 2'-O-methyl-uridine-3'-phosphorothioate
  modified_base 3: mod_base = OTHER; note = 2'-O-methyl-uridine-3'-phosphate
  modified_base 4: mod_base = OTHER; note = 2'-O-methyl-uridine-3'-phosphate
  modified_base 5: mod_base = OTHER; note = 2'-deoxy-2'-fluoro-cytidine-3'-phosphate
  modified_base 6: mod_base = OTHER; note = 2'-O-methyl-uridine-3'-phosphate
  modified_base 7: mod_base = OTHER; note = 2'-deoxy-2'-fluoro-guanosine-3'-phosphate
  modified_base 8: mod_base = OTHER; note = 2'-deoxy-2'-fluoro-adenosine-3'-phosphate
  modified_base 9: mod_base = OTHER; note = 2'-deoxy-2'-fluoro-adenosine-3'-phosphate
  modified_base 10: mod_base = OTHER; note = 2'-O-methyl-guanosine-3'-phosphate
  modified_base 11: mod_base = OTHER; note = 2'-O-methyl-adenosine-3'-phosphate
  modified_base 12: mod_base = OTHER; note = 2'-O-methyl-uridine-3'-phosphate
  modified_base 13: mod_base = OTHER; note = 2'-O-methyl-guanosine-3'-phosphate
  modified_base 14: mod_base = OTHER; note = 2'-O-methyl-adenosine-3'-phosphate
  modified_base 15: mod_base = OTHER; note = 2'-O-methyl-adenosine-3'-phosphate
  modified_base 16: mod_base = OTHER; note = 2'-O-methyl-guanosine-3'-phosphate
  modified_base 17: mod_base = OTHER; note = 2'-O-methyl-adenosine-3'-phosphate
  modified_base 18: mod_base = OTHER; note = 2'-O-methyl-guanosine-3'-phosphate
  modified_base 19: mod_base = OTHER; note = 2'-O-methyl-adenosine-3'-phosphate
ttttctgaagatgaagaga

SEQ ID NO: 1703 - RNA, 19 nt, synthetic construct
  source 1..19: mol_type = other RNA
  modified_base 1: mod_base = OTHER; note = 2'-O-methyl-uridine-3'-phosphorothioate
  modified_base 2: mod_base = OTHER; note = 2'-O-methyl-uridine-3'-phosphorothioate
  modified_base 3: mod_base = OTHER; note = 2'-O-methyl-uridine-3'-phosphate
  modified_base 4: mod_base = OTHER; note = 2'-O-methyl-cytidine-3'-phosphate
  modified_base 5: mod_base = OTHER; note = 2'-deoxy-2'-fluoro-uridine-3'-phosphate
  modified_base 6: mod_base = OTHER; note = 2'-O-methyl-guanosine-3'-phosphate
  modified_base 7: mod_base = OTHER; note = 2'-deoxy-2'-fluoro-adenosine-3'-phosphate
  modified_base 8: mod_base = OTHER; note = 2'-deoxy-2'-fluoro-adenosine-3'-phosphate
  modified_base 9: mod_base = OTHER; note = 2'-deoxy-2'-fluoro-guanosine-3'-phosphate
  modified_base 10: mod_base = OTHER; note = 2'-O-methyl-adenosine-3'-phosphate
  modified_base 11: mod_base = OTHER; note = 2'-O-methyl-uridine-3'-phosphate
  modified_base 12: mod_base = OTHER; note = 2'-O-methyl-guanosine-3'-phosphate
  modified_base 13: mod_base = OTHER; note = 2'-O-methyl-adenosine-3'-phosphate
  modified_base 14: mod_base = OTHER; note = 2'-O-methyl-adenosine-3'-phosphate
  modified_base 15: mod_base = OTHER; note = 2'-O-methyl-guanosine-3'-phosphate
  modified_base 16: mod_base = OTHER; note = 2'-O-methyl-adenosine-3'-phosphate
  modified_base 17: mod_base = OTHER; note = 2'-O-methyl-guanosine-3'-phosphate
  modified_base 18: mod_base = OTHER; note = 2'-O-methyl-uridine-3'-phosphate
  modified_base 19: mod_base = OTHER; note = 2'-O-methyl-adenosine-3'-phosphate
tttctgaagatgaagagta

SEQ ID NO: 1704 - RNA, 19 nt, synthetic construct
  source 1..19: mol_type = other RNA
  modified_base 1: mod_base = OTHER; note = 2'-O-methyl-uridine-3'-phosphorothioate
  modified_base 2: mod_base = OTHER; note = 2'-O-methyl-uridine-3'-phosphorothioate
  modified_base 3: mod_base = OTHER; note = 2'-O-methyl-cytidine-3'-phosphate
  modified_base 4: mod_base = OTHER; note = 2'-O-methyl-uridine-3'-phosphate
  modified_base 5: mod_base = OTHER; note = 2'-deoxy-2'-fluoro-guanosine-3'-phosphate
  modified_base 6: mod_base = OTHER; note = 2'-O-methyl-adenosine-3'-phosphate
  modified_base 7: mod_base = OTHER; note = 2'-deoxy-2'-fluoro-adenosine-3'-phosphate
  modified_base 8: mod_base = OTHER; note = 2'-deoxy-2'-fluoro-guanosine-3'-phosphate
  modified_base 9: mod_base = OTHER; note = 2'-deoxy-2'-fluoro-adenosine-3'-phosphate
  modified_base 10: mod_base = OTHER; note = 2'-O-methyl-uridine-3'-phosphate
  modified_base 11: mod_base = OTHER; note = 2'-O-methyl-guanosine-3'-phosphate
  modified_base 12: mod_base = OTHER; note = 2'-O-methyl-adenosine-3'-phosphate
  modified_base 13: mod_base = OTHER; note = 2'-O-methyl-adenosine-3'-phosphate
  modified_base 14: mod_base = OTHER; note = 2'-O-methyl-guanosine-3'-phosphate
  modified_base 15: mod_base = OTHER; note = 2'-O-methyl-adenosine-3'-phosphate
  modified_base 16: mod_base = OTHER; note = 2'-O-methyl-guanosine-3'-phosphate
  modified_base 17: mod_base = OTHER; note = 2'-O-methyl-uridine-3'-phosphate
  modified_base 18: mod_base = OTHER; note = 2'-O-methyl-uridine-3'-phosphate
  modified_base 19: mod_base = OTHER; note = 2'-O-methyl-adenosine-3'-phosphate
ttctgaagatgaagagtta

SEQ ID NO: 1705 - RNA, 19 nt, synthetic construct
  source 1..19: mol_type = other RNA
  modified_base 1: mod_base = OTHER; note = 2'-O-methyl-uridine-3'-phosphorothioate
  modified_base 2: mod_base = OTHER; note = 2'-O-methyl-cytidine-3'-phosphorothioate
  modified_base 3: mod_base = OTHER; note = 2'-O-methyl-uridine-3'-phosphate
  modified_base 4: mod_base = OTHER; note = 2'-O-methyl-guanosine-3'-phosphate
  modified_base 5: mod_base = OTHER; note = 2'-deoxy-2'-fluoro-adenosine-3'-phosphate
  modified_base 6: mod_base = OTHER; note = 2'-O-methyl-adenosine-3'-phosphate
  modified_base 7: mod_base = OTHER; note = 2'-deoxy-2'-fluoro-guanosine-3'-phosphate
  modified_base 8: mod_base = OTHER; note = 2'-deoxy-2'-fluoro-adenosine-3'-phosphate
  modified_base 9: mod_base = OTHER; note = 2'-deoxy-2'-fluoro-uridine-3'-phosphate
  modified_base 10: mod_base = OTHER; note = 2'-O-methyl-guanosine-3'-phosphate
  modified_base 11: mod_base = OTHER; note = 2'-O-methyl-adenosine-3'-phosphate
  modified_base 12: mod_base = OTHER; note = 2'-O-methyl-adenosine-3'-phosphate
  modified_base 13: mod_base = OTHER; note = 2'-O-methyl-guanosine-3'-phosphate
  modified_base 14: mod_base = OTHER; note = 2'-O-methyl-adenosine-3'-phosphate
  modified_base 15: mod_base = OTHER; note = 2'-O-methyl-guanosine-3'-phosphate
  modified_base 16: mod_base = OTHER; note = 2'-O-methyl-uridine-3'-phosphate
  modified_base 17: mod_base = OTHER; note = 2'-O-methyl-uridine-3'-phosphate
  modified_base 18: mod_base = OTHER; note = 2'-O-methyl-uridine-3'-phosphate
  modified_base 19: mod_base = OTHER; note = 2'-O-methyl-adenosine-3'-phosphate
tctgaagatgaagagttta

SEQ ID NO: 1706 - RNA, 19 nt, synthetic construct
  source 1..19: mol_type = other RNA
  modified_base 1: mod_base = OTHER; note = 2'-O-methyl-cytidine-3'-phosphorothioate
  modified_base 2: mod_base = OTHER; note = 2'-O-methyl-uridine-3'-phosphorothioate
  modified_base 3: mod_base = OTHER; note = 2'-O-methyl-guanosine-3'-phosphate
  modified_base 4: mod_base = OTHER; note = 2'-O-methyl-adenosine-3'-phosphate
  modified_base 5: mod_base = OTHER; note = 2'-deoxy-2'-fluoro-adenosine-3'-phosphate
  modified_base 6: mod_base = OTHER; note = 2'-O-methyl-guanosine-3'-phosphate
  modified_base 7: mod_base = OTHER; note = 2'-deoxy-2'-fluoro-adenosine-3'-phosphate
  modified_base 8: mod_base = OTHER; note = 2'-deoxy-2'-fluoro-uridine-3'-phosphate
  modified_base 9: mod_base = OTHER; note = 2'-deoxy-2'-fluoro-guanosine-3'-phosphate
  modified_base 10: mod_base = OTHER; note = 2'-O-methyl-adenosine-3'-phosphate
  modified_base 11: mod_base = OTHER; note = 2'-O-methyl-adenosine-3'-phosphate
  modified_base 12: mod_base = OTHER; note = 2'-O-methyl-guanosine-3'-phosphate
  modified_base 13: mod_base = OTHER; note = 2'-O-methyl-adenosine-3'-phosphate
  modified_base 14: mod_base = OTHER; note = 2'-O-methyl-guanosine-3'-phosphate
  modified_base 15: mod_base = OTHER; note = 2'-O-methyl-uridine-3'-phosphate
  modified_base 16: mod_base = OTHER; note = 2'-O-methyl-uridine-3'-phosphate
  modified_base 17: mod_base = OTHER; note = 2'-O-methyl-uridine-3'-phosphate
  modified_base 18: mod_base = OTHER; note = 2'-O-methyl-adenosine-3'-phosphate
  modified_base 19: mod_base = OTHER; note = 2'-O-methyl-adenosine-3'-phosphate
ctgaagatgaagagtttaa

SEQ ID NO: 1707 - RNA, 19 nt, synthetic construct
  source 1..19: mol_type = other RNA
  modified_base 1: mod_base = OTHER; note = 2'-O-methyl-uridine-3'-phosphorothioate
  modified_base 2: mod_base = OTHER; note = 2'-O-methyl-guanosine-3'-phosphorothioate
  modified_base 3: mod_base = OTHER; note = 2'-O-methyl-adenosine-3'-phosphate
  modified_base 4: mod_base = OTHER; note = 2'-O-methyl-adenosine-3'-phosphate
  modified_base 5: mod_base = OTHER; note = 2'-deoxy-2'-fluoro-guanosine-3'-phosphate
  modified_base 6: mod_base = OTHER; note = 2'-O-methyl-adenosine-3'-phosphate
  modified_base 7: mod_base = OTHER; note = 2'-deoxy-2'-fluoro-uridine-3'-phosphate
  modified_base 8: mod_base = OTHER; note = 2'-deoxy-2'-fluoro-guanosine-3'-phosphate
  modified_base 9: mod_base = OTHER; note = 2'-deoxy-2'-fluoro-adenosine-3'-phosphate
  modified_base 10: mod_base = OTHER; note = 2'-O-methyl-adenosine-3'-phosphate
  modified_base 11: mod_base = OTHER; note = 2'-O-methyl-guanosine-3'-phosphate
  modified_base 12: mod_base = OTHER; note = 2'-O-methyl-adenosine-3'-phosphate
  modified_base 13: mod_base = OTHER; note = 2'-O-methyl-guanosine-3'-phosphate
  modified_base 14: mod_base = OTHER; note = 2'-O-methyl-uridine-3'-phosphate
  modified_base 15: mod_base = OTHER; note = 2'-O-methyl-uridine-3'-phosphate
  modified_base 16: mod_base = OTHER; note = 2'-O-methyl-uridine-3'-phosphate
  modified_base 17: mod_base = OTHER; note = 2'-O-methyl-adenosine-3'-phosphate
  modified_base 18: mod_base = OTHER; note = 2'-O-methyl-guanosine-3'-phosphate
  modified_base 19: mod_base = OTHER; note = 2'-O-methyl-adenosine-3'-phosphate
tgaagatgaagagtttaga

SEQ ID NO: 1708 - RNA, 19 nt, synthetic construct
  source 1..19: mol_type = other RNA
  modified_base 1: mod_base = OTHER; note = 2'-O-methyl-guanosine-3'-phosphorothioate
  modified_base 2: mod_base = OTHER; note = 2'-O-methyl-adenosine-3'-phosphorothioate
  modified_base 3: mod_base = OTHER; note = 2'-O-methyl-adenosine-3'-phosphate
  modified_base 4: mod_base = OTHER; note = 2'-O-methyl-guanosine-3'-phosphate
  modified_base 5: mod_base = OTHER; note = 2'-deoxy-2'-fluoro-adenosine-3'-phosphate
  modified_base 6: mod_base = OTHER; note = 2'-O-methyl-uridine-3'-phosphate
  modified_base 7: mod_base = OTHER; note = 2'-deoxy-2'-fluoro-guanosine-3'-phosphate
  modified_base 8: mod_base = OTHER; note = 2'-deoxy-2'-fluoro-adenosine-3'-phosphate
  modified_base 9: mod_base = OTHER; note = 2'-deoxy-2'-fluoro-adenosine-3'-phosphate
  modified_base 10: mod_base = OTHER; note = 2'-O-methyl-guanosine-3'-phosphate
  modified_base 11: mod_base = OTHER; note = 2'-O-methyl-adenosine-3'-phosphate
  modified_base 12: mod_base = OTHER; note = 2'-O-methyl-guanosine-3'-phosphate
  modified_base 13: mod_base = OTHER; note = 2'-O-methyl-uridine-3'-phosphate
  modified_base 14: mod_base = OTHER; note = 2'-O-methyl-uridine-3'-phosphate
  modified_base 15: mod_base = OTHER; note = 2'-O-methyl-uridine-3'-phosphate
  modified_base 16: mod_base = OTHER; note = 2'-O-methyl-adenosine-3'-phosphate
  modified_base 17: mod_base = OTHER; note = 2'-O-methyl-guanosine-3'-phosphate
  modified_base 18: mod_base = OTHER; note = 2'-O-methyl-uridine-3'-phosphate
  modified_base 19: mod_base = OTHER; note = 2'-O-methyl-adenosine-3'-phosphate
gaagatgaagagtttagta

SEQ ID NO: 1709 - RNA, 19 nt, synthetic construct
  source 1..19: mol_type = other RNA
  modified_base 1: mod_base = OTHER; note = 2'-O-methyl-adenosine-3'-phosphorothioate
  modified_base 2: mod_base = OTHER; note = 2'-O-methyl-cytidine-3'-phosphorothioate
  modified_base 3: mod_base = OTHER; note = 2'-O-methyl-uridine-3'-phosphate
  modified_base 4: mod_base = OTHER; note = 2'-O-methyl-guanosine-3'-phosphate
  modified_base 5: mod_base = OTHER; note = 2'-deoxy-2'-fluoro-cytidine-3'-phosphate
  modified_base 6: mod_base = OTHER; note = 2'-O-methyl-adenosine-3'-phosphate
  modified_base 7: mod_base = OTHER; note = 2'-deoxy-2'-fluoro-cytidine-3'-phosphate
  modified_base 8: mod_base = OTHER; note = 2'-deoxy-2'-fluoro-uridine-3'-phosphate
  modified_base 9: mod_base = OTHER; note = 2'-deoxy-2'-fluoro-guanosine-3'-phosphate
  modified_base 10: mod_base = OTHER; note = 2'-O-methyl-cytidine-3'-phosphate
  modified_base 11: mod_base = OTHER; note = 2'-O-methyl-cytidine-3'-phosphate
  modified_base 12: mod_base = OTHER; note = 2'-O-methyl-adenosine-3'-phosphate
  modified_base 13: mod_base = OTHER; note = 2'-O-methyl-adenosine-3'-phosphate
  modified_base 14: mod_base = OTHER; note = 2'-O-methyl-cytidine-3'-phosphate
  modified_base 15: mod_base = OTHER; note = 2'-O-methyl-adenosine-3'-phosphate
  modified_base 16: mod_base = OTHER; note = 2'-O-methyl-adenosine-3'-phosphate
  modified_base 17: mod_base = OTHER; note = 2'-O-methyl-guanosine-3'-phosphate
  modified_base 18: mod_base = OTHER; note = 2'-O-methyl-uridine-3'-phosphate
  modified_base 19: mod_base = OTHER; note = 2'-O-methyl-adenosine-3'-phosphate
actgcactgccaacaagta

SEQ ID NO: 1710 - RNA, 19 nt, synthetic construct
  source 1..19: mol_type = other RNA
  modified_base 1: mod_base = OTHER; note = 2'-O-methyl-guanosine-3'-phosphorothioate
  modified_base 2: mod_base = OTHER; note = 2'-O-methyl-cytidine-3'-phosphorothioate
  modified_base 3: mod_base = OTHER; note = 2'-O-methyl-adenosine-3'-phosphate
  modified_base 4: mod_base = OTHER; note = 2'-O-methyl-cytidine-3'-phosphate
  modified_base 5: mod_base = OTHER; note = 2'-deoxy-2'-fluoro-uridine-3'-phosphate
  modified_base 6: mod_base = OTHER; note = 2'-O-methyl-guanosine-3'-phosphate
  modified_base 7: mod_base = OTHER; note = 2'-deoxy-2'-fluoro-cytidine-3'-phosphate
  modified_base 8: mod_base = OTHER; note = 2'-deoxy-2'-fluoro-cytidine-3'-phosphate
  modified_base 9: mod_base = OTHER; note = 2'-deoxy-2'-fluoro-adenosine-3'-phosphate
  modified_base 10: mod_base = OTHER; note = 2'-O-methyl-adenosine-3'-phosphate
  modified_base 11: mod_base = OTHER; note = 2'-O-methyl-cytidine-3'-phosphate
  modified_base 12: mod_base = OTHER; note = 2'-O-methyl-adenosine-3'-phosphate
  modified_base 13: mod_base = OTHER; note = 2'-O-methyl-adenosine-3'-phosphate
  modified_base 14: mod_base = OTHER; note = 2'-O-methyl-guanosine-3'-phosphate
  modified_base 15: mod_base = OTHER; note = 2'-O-methyl-uridine-3'-phosphate
  modified_base 16: mod_base = OTHER; note = 2'-O-methyl-uridine-3'-phosphate
  modified_base 17: mod_base = OTHER; note = 2'-O-methyl-cytidine-3'-phosphate
  modified_base 18: mod_base = OTHER; note = 2'-O-methyl-adenosine-3'-phosphate
  modified_base 19: mod_base = OTHER; note = 2'-O-methyl-adenosine-3'-phosphate
gcactgccaacaagttcaa

SEQ ID NO: 1711 - RNA, 19 nt, synthetic construct
  source 1..19: mol_type = other RNA
  modified_base 1: mod_base = OTHER; note = 2'-O-methyl-uridine-3'-phosphorothioate
  modified_base 2: mod_base = OTHER; note = 2'-O-methyl-guanosine-3'-phosphorothioate
  modified_base 3: mod_base = OTHER; note = 2'-O-methyl-cytidine-3'-phosphate
  modified_base 4: mod_base = OTHER; note = 2'-O-methyl-cytidine-3'-phosphate
  modified_base 5: mod_base = OTHER; note = 2'-deoxy-2'-fluoro-adenosine-3'-phosphate
  modified_base 6: mod_base = OTHER; note = 2'-O-methyl-adenosine-3'-phosphate
  modified_base 7: mod_base = OTHER; note = 2'-deoxy-2'-fluoro-cytidine-3'-phosphate
  modified_base 8: mod_base = OTHER; note = 2'-deoxy-2'-fluoro-adenosine-3'-phosphate
  modified_base 9: mod_base = OTHER; note = 2'-deoxy-2'-fluoro-adenosine-3'-phosphate
  modified_base 10: mod_base = OTHER; note = 2'-O-methyl-guanosine-3'-phosphate
  modified_base 11: mod_base = OTHER; note = 2'-O-methyl-uridine-3'-phosphate
  modified_base 12: mod_base = OTHER; note = 2'-O-methyl-uridine-3'-phosphate
  modified_base 13: mod_base = OTHER; note = 2'-O-methyl-cytidine-3'-phosphate
  modified_base 14: mod_base = OTHER; note = 2'-O-methyl-adenosine-3'-phosphate
  modified_base 15: mod_base = OTHER; note = 2'-O-methyl-cytidine-3'-phosphate
  modified_base 16: mod_base = OTHER; note = 2'-O-methyl-uridine-3'-phosphate
  modified_base 17: mod_base = OTHER; note = 2'-O-methyl-uridine-3'-phosphate
  modified_base 18: mod_base = OTHER; note = 2'-O-methyl-cytidine-3'-phosphate
  modified_base 19: mod_base = OTHER; note = 2'-O-methyl-adenosine-3'-phosphate
tgccaacaagttcacttca

SEQ ID NO: 1712 - RNA, 19 nt, synthetic construct
  source 1..19: mol_type = other RNA
  modified_base 1: mod_base = OTHER; note = 2'-O-methyl-uridine-3'-phosphorothioate
  modified_base 2: mod_base = OTHER; note = 2'-O-methyl-uridine-3'-phosphorothioate
  modified_base 3: mod_base = OTHER; note = 2'-O-methyl-cytidine-3'-phosphate
  modified_base 4: mod_base = OTHER; note = 2'-O-methyl-adenosine-3'-phosphate
  modified_base 5: mod_base = OTHER; note = 2'-deoxy-2'-fluoro-cytidine-3'-phosphate
  modified_base 6: mod_base = OTHER; note = 2'-O-methyl-uridine-3'-phosphate
  modified_base 7: mod_base = OTHER; note = 2'-deoxy-2'-fluoro-uridine-3'-phosphate
  modified_base 8: mod_base = OTHER; note = 2'-deoxy-2'-fluoro-cytidine-3'-phosphate
  modified_base 9: mod_base = OTHER; note = 2'-deoxy-2'-fluoro-adenosine-3'-phosphate
  modified_base 10: mod_base = OTHER; note = 2'-O-methyl-uridine-3'-phosphate
  modified_base 11: mod_base = OTHER; note = 2'-O-methyl-adenosine-3'-phosphate
  modified_base 12: mod_base = OTHER; note = 2'-O-methyl-uridine-3'-phosphate
  modified_base 13: mod_base = OTHER; note = 2'-O-methyl-adenosine-3'-phosphate
  modified_base 14: mod_base = OTHER; note = 2'-O-methyl-uridine-3'-phosphate
  modified_base 15: mod_base = OTHER; note = 2'-O-methyl-adenosine-3'-phosphate
  modified_base 16: mod_base = OTHER; note = 2'-O-methyl-adenosine-3'-phosphate
  modified_base 17: mod_base = OTHER; note = 2'-O-methyl-adenosine-3'-phosphate
  modified_base 18: mod_base = OTHER; note = 2'-O-methyl-guanosine-3'-phosphate
  modified_base 19: mod_base = OTHER; note = 2'-O-methyl-adenosine-3'-phosphate
ttcacttcatatataaaga

SEQ ID NO: 1713 - RNA, 19 nt, synthetic construct
  source 1..19: mol_type = other RNA
  modified_base 1: mod_base = OTHER; note = 2'-O-methyl-uridine-3'-phosphorothioate
  modified_base 2: mod_base = OTHER; note = 2'-O-methyl-cytidine-3'-phosphorothioate
  modified_base 3: mod_base = OTHER; note = 2'-O-methyl-adenosine-3'-phosphate
  modified_base 4: mod_base = OTHER; note = 2'-O-methyl-cytidine-3'-phosphate
  modified_base 5: mod_base = OTHER; note = 2'-deoxy-2'-fluoro-uridine-3'-phosphate
  modified_base 6: mod_base = OTHER; note = 2'-O-methyl-uridine-3'-phosphate
  modified_base 7: mod_base = OTHER; note = 2'-deoxy-2'-fluoro-cytidine-3'-phosphate
  modified_base 8: mod_base = OTHER; note = 2'-deoxy-2'-fluoro-adenosine-3'-phosphate
  modified_base 9: mod_base = OTHER; note = 2'-deoxy-2'-fluoro-uridine-3'-phosphate
  modified_base 10: mod_base = OTHER; note = 2'-O-methyl-adenosine-3'-phosphate
  modified_base 11: mod_base = OTHER; note = 2'-O-methyl-uridine-3'-phosphate
  modified_base 12: mod_base = OTHER; note = 2'-O-methyl-adenosine-3'-phosphate
  modified_base 13: mod_base = OTHER; note = 2'-O-methyl-uridine-3'-phosphate
  modified_base 14: mod_base = OTHER; note = 2'-O-methyl-adenosine-3'-phosphate
  modified_base 15: mod_base = OTHER; note = 2'-O-methyl-adenosine-3'-phosphate
  modified_base 16: mod_base = OTHER; note = 2'-O-methyl-adenosine-3'-phosphate
  modified_base 17: mod_base = OTHER; note = 2'-O-methyl-guanosine-3'-phosphate
  modified_base 18: mod_base = OTHER; note = 2'-O-methyl-cytidine-3'-phosphate
  modified_base 19: mod_base = OTHER; note = 2'-O-methyl-adenosine-3'-phosphate
tcacttcatatataaagca

SEQ ID NO: 1714 - RNA, 19 nt, synthetic construct
  source 1..19: mol_type = other RNA
  modified_base 1: mod_base = OTHER; note = 2'-O-methyl-cytidine-3'-phosphorothioate
  modified_base 2: mod_base = OTHER; note = 2'-O-methyl-adenosine-3'-phosphorothioate
  modified_base 3: mod_base = OTHER; note = 2'-O-methyl-cytidine-3'-phosphate
  modified_base 4: mod_base = OTHER; note = 2'-O-methyl-uridine-3'-phosphate
  modified_base 5: mod_base = OTHER; note = 2'-deoxy-2'-fluoro-uridine-3'-phosphate
  modified_base 6: mod_base = OTHER; note = 2'-O-methyl-cytidine-3'-phosphate
  modified_base 7: mod_base = OTHER; note = 2'-deoxy-2'-fluoro-adenosine-3'-phosphate
  modified_base 8: mod_base = OTHER; note = 2'-deoxy-2'-fluoro-uridine-3'-phosphate
  modified_base 9: mod_base = OTHER; note = 2'-deoxy-2'-fluoro-adenosine-3'-phosphate
  modified_base 10: mod_base = OTHER; note = 2'-O-methyl-uridine-3'-phosphate
  modified_base 11: mod_base = OTHER; note = 2'-O-methyl-adenosine-3'-phosphate
  modified_base 12: mod_base = OTHER; note = 2'-O-methyl-uridine-3'-phosphate
  modified_base 13: mod_base = OTHER; note = 2'-O-methyl-adenosine-3'-phosphate
  modified_base 14: mod_base = OTHER; note = 2'-O-methyl-adenosine-3'-phosphate
  modified_base 15: mod_base = OTHER; note = 2'-O-methyl-adenosine-3'-phosphate
  modified_base 16: mod_base = OTHER; note = 2'-O-methyl-guanosine-3'-phosphate
  modified_base 17: mod_base = OTHER; note = 2'-O-methyl-cytidine-3'-phosphate
  modified_base 18: mod_base = OTHER; note = 2'-O-methyl-adenosine-3'-phosphate
  modified_base 19: mod_base = OTHER; note = 2'-O-methyl-adenosine-3'-phosphate
cacttcatatataaagcaa

SEQ ID NO: 1715 - RNA, 19 nt, synthetic construct
  source 1..19: mol_type = other RNA
  modified_base 1: mod_base = OTHER; note = 2'-O-methyl-uridine-3'-phosphorothioate
  modified_base 2: mod_base = OTHER; note = 2'-O-methyl-uridine-3'-phosphorothioate
  modified_base 3: mod_base = OTHER; note = 2'-O-methyl-uridine-3'-phosphate
  modified_base 4: mod_base = OTHER; note = 2'-O-methyl-uridine-3'-phosphate
  modified_base 5: mod_base = OTHER; note = 2'-deoxy-2'-fluoro-adenosine-3'-phosphate
  modified_base 6: mod_base = OTHER; note = 2'-O-methyl-cytidine-3'-phosphate
  modified_base 7: mod_base = OTHER; note = 2'-deoxy-2'-fluoro-uridine-3'-phosphate
  modified_base 8: mod_base = OTHER; note = 2'-deoxy-2'-fluoro-cytidine-3'-phosphate
  modified_base 9: mod_base = OTHER; note = 2'-deoxy-2'-fluoro-uridine-3'-phosphate
  modified_base 10: mod_base = OTHER; note = 2'-O-methyl-uridine-3'-phosphate
  modified_base 11: mod_base = OTHER; note = 2'-O-methyl-uridine-3'-phosphate
  modified_base 12: mod_base = OTHER; note = 2'-O-methyl-uridine-3'-phosphate
  modified_base 13: mod_base = OTHER; note = 2'-O-methyl-guanosine-3'-phosphate
  modified_base 14: mod_base = OTHER; note = 2'-O-methyl-adenosine-3'-phosphate
  modified_base 15: mod_base = OTHER; note = 2'-O-methyl-guanosine-3'-phosphate
  modified_base 16: mod_base = OTHER; note = 2'-O-methyl-guanosine-3'-phosphate
  modified_base 17: mod_base = OTHER; note = 2'-O-methyl-uridine-3'-phosphate
  modified_base 18: mod_base = OTHER; note = 2'-O-methyl-guanosine-3'-phosphate
  modified_base 19: mod_base = OTHER; note = 2'-O-methyl-adenosine-3'-phosphate
ttttactcttttgaggtga

SEQ ID NO: 1716 - RNA, 19 nt, synthetic construct
  source 1..19: mol_type = other RNA
  modified_base 1: mod_base = OTHER; note = 2'-O-methyl-uridine-3'-phosphorothioate
  modified_base 2: mod_base = OTHER; note = 2'-O-methyl-uridine-3'-phosphorothioate
  modified_base 3: mod_base = OTHER; note = 2'-O-methyl-uridine-3'-phosphate
  modified_base 4: mod_base = OTHER; note = 2'-O-methyl-adenosine-3'-phosphate
  modified_base 5: mod_base = OTHER; note = 2'-deoxy-2'-fluoro-cytidine-3'-phosphate
  modified_base 6: mod_base = OTHER; note = 2'-O-methyl-uridine-3'-phosphate
  modified_base 7: mod_base = OTHER; note = 2'-deoxy-2'-fluoro-cytidine-3'-phosphate
  modified_base 8: mod_base = OTHER; note = 2'-deoxy-2'-fluoro-uridine-3'-phosphate
  modified_base 9: mod_base = OTHER; note = 2'-deoxy-2'-fluoro-uridine-3'-phosphate
  modified_base 10: mod_base = OTHER; note = 2'-O-methyl-uridine-3'-phosphate
  modified_base 11: mod_base = OTHER; note = 2'-O-methyl-uridine-3'-phosphate
  modified_base 12: mod_base = OTHER; note = 2'-O-methyl-guanosine-3'-phosphate
  modified_base 13: mod_base = OTHER; note = 2'-O-methyl-adenosine-3'-phosphate
  modified_base 14: mod_base = OTHER; note = 2'-O-methyl-guanosine-3'-phosphate
  modified_base 15: mod_base = OTHER; note = 2'-O-methyl-guanosine-3'-phosphate
  modified_base 16: mod_base = OTHER; note = 2'-O-methyl-uridine-3'-phosphate
  modified_base 17: mod_base = OTHER; note = 2'-O-methyl-guanosine-3'-phosphate
  modified_base 18: mod_base = OTHER; note = 2'-O-methyl-adenosine-3'-phosphate
  modified_base 19: mod_base = OTHER; note = 2'-O-methyl-adenosine-3'-phosphate
tttactcttttgaggtgaa

SEQ ID NO: 1717 - RNA, 19 nt, synthetic construct
  source 1..19: mol_type = other RNA
  modified_base 1: mod_base = OTHER; note = 2'-O-methyl-uridine-3'-phosphorothioate
  modified_base 2: mod_base = OTHER; note = 2'-O-methyl-uridine-3'-phosphorothioate
  modified_base 3: mod_base = OTHER; note = 2'-O-methyl-adenosine-3'-phosphate
  modified_base 4: mod_base = OTHER; note = 2'-O-methyl-cytidine-3'-phosphate
  modified_base 5: mod_base = OTHER; note = 2'-deoxy-2'-fluoro-uridine-3'-phosphate
  modified_base 6: mod_base = OTHER; note = 2'-O-methyl-cytidine-3'-phosphate
  modified_base 7: mod_base = OTHER; note = 2'-deoxy-2'-fluoro-uridine-3'-phosphate
  modified_base 8: mod_base = OTHER; note = 2'-deoxy-2'-fluoro-uridine-3'-phosphate
  modified_base 9: mod_base = OTHER; note = 2'-deoxy-2'-fluoro-uridine-3'-phosphate
  modified_base 10: mod_base = OTHER; note = 2'-O-methyl-uridine-3'-phosphate
  modified_base 11: mod_base = OTHER; note = 2'-O-methyl-guanosine-3'-phosphate
  modified_base 12: mod_base = OTHER; note = 2'-O-methyl-adenosine-3'-phosphate
  modified_base 13: mod_base = OTHER; note = 2'-O-methyl-guanosine-3'-phosphate
  modified_base 14: mod_base = OTHER; note = 2'-O-methyl-guanosine-3'-phosphate
  modified_base 15: mod_base = OTHER; note = 2'-O-methyl-uridine-3'-phosphate
  modified_base 16: mod_base = OTHER; note = 2'-O-methyl-guanosine-3'-phosphate
  modified_base 17: mod_base = OTHER; note = 2'-O-methyl-adenosine-3'-phosphate
  modified_base 18: mod_base = OTHER; note = 2'-O-methyl-adenosine-3'-phosphate
  modified_base 19: mod_base = OTHER; note = 2'-O-methyl-adenosine-3'-phosphate
ttactcttttgaggtgaaa

SEQ ID NO: 1718 - RNA, 19 nt, synthetic construct
  source 1..19: mol_type = other RNA
  modified_base 1: mod_base = OTHER; note = 2'-O-methyl-uridine-3'-phosphorothioate
  modified_base 2: mod_base = OTHER; note = 2'-O-methyl-adenosine-3'-phosphorothioate
  modified_base 3: mod_base = OTHER; note = 2'-O-methyl-cytidine-3'-phosphate
  modified_base 4: mod_base = OTHER; note = 2'-O-methyl-uridine-3'-phosphate
  modified_base 5: mod_base = OTHER; note = 2'-deoxy-2'-fluoro-cytidine-3'-phosphate
  modified_base 6: mod_base = OTHER; note = 2'-O-methyl-uridine-3'-phosphate
  modified_base 7: mod_base = OTHER; note = 2'-deoxy-2'-fluoro-uridine-3'-phosphate
  modified_base 8: mod_base = OTHER; note = 2'-deoxy-2'-fluoro-uridine-3'-phosphate
  modified_base 9: mod_base = OTHER; note = 2'-deoxy-2'-fluoro-uridine-3'-phosphate
  modified_base 10: mod_base = OTHER; note = 2'-O-methyl-guanosine-3'-phosphate
  modified_base 11: mod_base = OTHER; note = 2'-O-methyl-adenosine-3'-phosphate
  modified_base 12: mod_base = OTHER; note = 2'-O-methyl-guanosine-3'-phosphate
  modified_base 13: mod_base = OTHER; note = 2'-O-methyl-guanosine-3'-phosphate
  modified_base 14: mod_base = OTHER; note = 2'-O-methyl-uridine-3'-phosphate
  modified_base 15: mod_base = OTHER; note = 2'-O-methyl-guanosine-3'-phosphate
  modified_base 16: mod_base = OTHER; note = 2'-O-methyl-adenosine-3'-phosphate
  modified_base 17: mod_base = OTHER; note = 2'-O-methyl-adenosine-3'-phosphate
  modified_base 18: mod_base = OTHER; note = 2'-O-methyl-uridine-3'-phosphate
  modified_base 19: mod_base = OTHER; note = 2'-O-methyl-adenosine-3'-phosphate
tactcttttgaggtgaata

SEQ ID NO: 1719 - RNA, 19 nt, synthetic construct
  source 1..19: mol_type = other RNA
  modified_base 1: mod_base = OTHER; note = 2'-O-methyl-guanosine-3'-phosphorothioate
  modified_base 2: mod_base = OTHER; note = 2'-O-methyl-guanosine-3'-phosphorothioate
  modified_base 3: mod_base = OTHER; note = 2'-O-methyl-uridine-3'-phosphate
  modified_base 4: mod_base = OTHER; note = 2'-O-methyl-cytidine-3'-phosphate
  modified_base 5: mod_base = OTHER; note = 2'-deoxy-2'-fluoro-uridine-3'-phosphate
  modified_base 6: mod_base = OTHER; note = 2'-O-methyl-uridine-3'-phosphate
  modified_base 7: mod_base = OTHER; note = 2'-deoxy-2'-fluoro-cytidine-3'-phosphate
  modified_base 8: mod_base = OTHER; note = 2'-deoxy-2'-fluoro-adenosine-3'-phosphate
  modified_base 9: mod_base = OTHER; note = 2'-deoxy-2'-fluoro-cytidine-3'-phosphate
  modified_base 10: mod_base = OTHER; note = 2'-O-methyl-cytidine-3'-phosphate
  modified_base 11: mod_base = OTHER; note = 2'-O-methyl-adenosine-3'-phosphate
  modified_base 12: mod_base = OTHER; note = 2'-O-methyl-adenosine-3'-phosphate
  modified_base 13: mod_base = OTHER; note = 2'-O-methyl-guanosine-3'-phosphate
  modified_base 14: mod_base = OTHER; note = 2'-O-methyl-uridine-3'-phosphate
  modified_base 15: mod_base = OTHER; note = 2'-O-methyl-adenosine-3'-phosphate
  modified_base 16: mod_base = OTHER; note = 2'-O-methyl-uridine-3'-phosphate
  modified_base 17: mod_base = OTHER; note = 2'-O-methyl-cytidine-3'-phosphate
  modified_base 18: mod_base = OTHER; note = 2'-O-methyl-adenosine-3'-phosphate
  modified_base 19: mod_base = OTHER; note = 2'-O-methyl-adenosine-3'-phosphate
ggtcttcaccaagtatcaa

SEQ ID NO: 1720 - RNA, 19 nt, synthetic construct
  source 1..19: mol_type = other RNA
  modified_base 1: mod_base = OTHER; note = 2'-O-methyl-guanosine-3'-phosphorothioate
  modified_base 2: mod_base = OTHER; note = 2'-O-methyl-uridine-3'-phosphorothioate
  modified_base 3: mod_base = OTHER; note = 2'-O-methyl-adenosine-3'-phosphate
  modified_base 4: mod_base = OTHER; note = 2'-O-methyl-uridine-3'-phosphate
  modified_base 5: mod_base = OTHER; note = 2'-deoxy-2'-fluoro-cytidine-3'-phosphate
  modified_base 6: mod_base = OTHER; note = 2'-O-methyl-adenosine-3'-phosphate
  modified_base 7: mod_base = OTHER; note = 2'-deoxy-2'-fluoro-adenosine-3'-phosphate
  modified_base 8: mod_base = OTHER; note = 2'-deoxy-2'-fluoro-adenosine-3'-phosphate
  modified_base 9: mod_base = OTHER; note = 2'-deoxy-2'-fluoro-guanosine-3'-phosphate
  modified_base 10: mod_base = OTHER; note = 2'-O-methyl-uridine-3'-phosphate
  modified_base 11: mod_base = OTHER; note = 2'-O-methyl-adenosine-3'-phosphate
  modified_base 12: mod_base = OTHER; note = 2'-O-methyl-adenosine-3'-phosphate
  modified_base 13: mod_base = OTHER; note = 2'-O-methyl-uridine-3'-phosphate
  modified_base 14: mod_base = OTHER; note = 2'-O-methyl-adenosine-3'-phosphate
  modified_base 15: mod_base = OTHER; note = 2'-O-methyl-adenosine-3'-phosphate
  modified_base 16: mod_base = OTHER; note = 2'-O-methyl-cytidine-3'-phosphate
  modified_base 17: mod_base = OTHER; note = 2'-O-methyl-adenosine-3'-phosphate
  modified_base 18: mod_base = OTHER; note = 2'-O-methyl-cytidine-3'-phosphate
  modified_base 19: mod_base = OTHER; note = 2'-O-methyl-adenosine-3'-phosphate
gtatcaaagtaataacaca

SEQ ID NO: 1721 - RNA, 19 nt, synthetic construct
  source 1..19: mol_type = other RNA
  modified_base 1: mod_base = OTHER; note = 2'-O-methyl-cytidine-3'-phosphorothioate
  modified_base 2: mod_base = OTHER; note = 2'-O-methyl-adenosine-3'-phosphorothioate
  modified_base 3: mod_base = OTHER; note = 2'-O-methyl-adenosine-3'-phosphate
  modified_base 4: mod_base = OTHER; note = 2'-O-methyl-adenosine-3'-phosphate
  modified_base 5: mod_base = OTHER; note = 2'-deoxy-2'-fluoro-guanosine-3'-phosphate
  modified_base 6: mod_base = OTHER; note = 2'-O-methyl-uridine-3'-phosphate
  modified_base 7: mod_base = OTHER; note = 2'-deoxy-2'-fluoro-adenosine-3'-phosphate
  modified_base 8: mod_base = OTHER; note = 2'-deoxy-2'-fluoro-adenosine-3'-phosphate
  modified_base 9: mod_base = OTHER; note = 2'-deoxy-2'-fluoro-uridine-3'-phosphate
  modified_base 10: mod_base = OTHER; note = 2'-O-methyl-adenosine-3'-phosphate
  modified_base 11: mod_base = OTHER; note = 2'-O-methyl-adenosine-3'-phosphate
  modified_base 12: mod_base = OTHER; note = 2'-O-methyl-cytidine-3'-phosphate
  modified_base 13: mod_base = OTHER; note = 2'-O-methyl-adenosine-3'-phosphate
  modified_base 14: mod_base = OTHER; note = 2'-O-methyl-cytidine-3'-phosphate
  modified_base 15: mod_base = OTHER; note = 2'-O-methyl-adenosine-3'-phosphate
  modified_base 16: mod_base = OTHER; note = 2'-O-methyl-adenosine-3'-phosphate
  modified_base 17: mod_base = OTHER; note = 2'-O-methyl-adenosine-3'-phosphate
  modified_base 18: mod_base = OTHER; note = 2'-O-methyl-uridine-3'-phosphate
  modified_base 19: mod_base = OTHER; note = 2'-O-methyl-adenosine-3'-phosphate
caaagtaataacacaaata

SEQ ID NO: 1722 - RNA, 19 nt, synthetic construct
  source 1..19: mol_type = other RNA
  modified_base 1: mod_base = OTHER; note = 2'-O-methyl-adenosine-3'-phosphorothioate
  modified_base 2: mod_base = OTHER; note = 2'-O-methyl-guanosine-3'-phosphorothioate
  modified_base 3: mod_base = OTHER; note = 2'-O-methyl-uridine-3'-phosphate
  modified_base 4: mod_base = OTHER; note = 2'-O-methyl-adenosine-3'-phosphate
  modified_base 5: mod_base = OTHER; note = 2'-deoxy-2'-fluoro-adenosine-3'-phosphate
  modified_base 6: mod_base = OTHER; note = 2'-O-methyl-uridine-3'-phosphate
  modified_base 7: mod_base = OTHER; note = 2'-deoxy-2'-fluoro-adenosine-3'-phosphate
  modified_base 8: mod_base = OTHER; note = 2'-deoxy-2'-fluoro-adenosine-3'-phosphate
  modified_base 9: mod_base = OTHER; note = 2'-deoxy-2'-fluoro-cytidine-3'-phosphate
  modified_base 10: mod_base = OTHER; note = 2'-O-methyl-adenosine-3'-phosphate
  modified_base 11: mod_base = OTHER; note = 2'-O-methyl-cytidine-3'-phosphate
  modified_base 12: mod_base = OTHER; note = 2'-O-methyl-adenosine-3'-phosphate
  modified_base 13: mod_base = OTHER; note = 2'-O-methyl-adenosine-3'-phosphate
  modified_base 14: mod_base = OTHER; note = 2'-O-methyl-adenosine-3'-phosphate
  modified_base 15: mod_base = OTHER; note = 2'-O-methyl-uridine-3'-phosphate
  modified_base 16: mod_base = OTHER; note = 2'-O-methyl-guanosine-3'-phosphate
  modified_base 17: mod_base = OTHER; note = 2'-O-methyl-adenosine-3'-phosphate
  modified_base 18: mod_base = OTHER; note = 2'-O-methyl-adenosine-3'-phosphate
  modified_base 19: mod_base = OTHER; note = 2'-O-methyl-adenosine-3'-phosphate
agtaataacacaaatgaaa

SEQ ID NO: 1723 - RNA, 19 nt, synthetic construct
  source 1..19: mol_type = other RNA
  modified_base 1: mod_base = OTHER; note = 2'-O-methyl-uridine-3'-phosphorothioate
  modified_base 2: mod_base = OTHER; note = 2'-O-methyl-guanosine-3'-phosphorothioate
  modified_base 3: mod_base = OTHER; note = 2'-O-methyl-adenosine-3'-phosphate
  modified_base 4: mod_base = OTHER; note = 2'-O-methyl-cytidine-3'-phosphate
  modified_base 5: mod_base = OTHER; note = 2'-deoxy-2'-fluoro-uridine-3'-phosphate
  modified_base 6: mod_base = OTHER; note = 2'-O-methyl-cytidine-3'-phosphate
  modified_base 7: mod_base = OTHER; note = 2'-deoxy-2'-fluoro-cytidine-3'-phosphate
  modified_base 8: mod_base = OTHER; note = 2'-deoxy-2'-fluoro-uridine-3'-phosphate
  modified_base 9: mod_base = OTHER; note = 2'-deoxy-2'-fluoro-cytidine-3'-phosphate
  modified_base 10: mod_base = OTHER; note = 2'-O-methyl-adenosine-3'-phosphate
  modified_base 11: mod_base = OTHER; note = 2'-O-methyl-cytidine-3'-phosphate
  modified_base 12: mod_base = OTHER; note = 2'-O-methyl-adenosine-3'-phosphate
  modified_base 13: mod_base = OTHER; note = 2'-O-methyl-uridine-3'-phosphate
  modified_base 14: mod_base = OTHER; note = 2'-O-methyl-cytidine-3'-phosphate
  modified_base 15: mod_base = OTHER; note = 2'-O-methyl-uridine-3'-phosphate
  modified_base 16: mod_base = OTHER; note = 2'-O-methyl-guanosine-3'-phosphate
  modified_base 17: mod_base = OTHER; note = 2'-O-methyl-uridine-3'-phosphate
  modified_base 18: mod_base = OTHER; note = 2'-O-methyl-uridine-3'-phosphate
  modified_base 19: mod_base = OTHER; note = 2'-O-methyl-adenosine-3'-phosphate
tgactcctcacatctgtta

SEQ ID NO: 1724 - RNA, 19 nt, synthetic construct
  source 1..19: mol_type = other RNA
  modified_base 1: mod_base = OTHER; note = 2'-O-methyl-adenosine-3'-phosphorothioate
  modified_base 2: mod_base = OTHER; note = 2'-O-methyl-cytidine-3'-phosphorothioate
  modified_base 3: mod_base = OTHER; note = 2'-O-methyl-uridine-3'-phosphate
  modified_base 4: mod_base = OTHER; note = 2'-O-methyl-cytidine-3'-phosphate
  modified_base 5: mod_base = OTHER; note = 2'-deoxy-2'-fluoro-cytidine-3'-phosphate
  modified_base 6: mod_base = OTHER; note = 2'-O-methyl-uridine-3'-phosphate
  modified_base 7: mod_base = OTHER; note = 2'-deoxy-2'-fluoro-cytidine-3'-phosphate
  modified_base 8: mod_base = OTHER; note = 2'-deoxy-2'-fluoro-adenosine-3'-phosphate
  modified_base 9: mod_base = OTHER; note = 2'-deoxy-2'-fluoro-cytidine-3'-phosphate
  modified_base 10: mod_base = OTHER; note = 2'-O-methyl-adenosine-3'-phosphate
  modified_base 11: mod_base = OTHER; note = 2'-O-methyl-uridine-3'-phosphate
  modified_base 12: mod_base = OTHER; note = 2'-O-methyl-cytidine-3'-phosphate
  modified_base 13: mod_base = OTHER; note = 2'-O-methyl-uridine-3'-phosphate
  modified_base 14: mod_base = OTHER; note = 2'-O-methyl-guanosine-3'-phosphate
  modified_base 15: mod_base = OTHER; note = 2'-O-methyl-uridine-3'-phosphate
  modified_base 16: mod_base = OTHER; note = 2'-O-methyl-uridine-3'-phosphate
  modified_base 17: mod_base = OTHER; note = 2'-O-methyl-adenosine-3'-phosphate
  modified_base 18: mod_base = OTHER; note = 2'-O-methyl-uridine-3'-phosphate
  modified_base 19: mod_base = OTHER; note = 2'-O-methyl-adenosine-3'-phosphate
actcctcacatctgttata

SEQ ID NO: 1725 - RNA, 19 nt, synthetic construct
  source 1..19: mol_type = other RNA
  modified_base 1: mod_base = OTHER; note = 2'-O-methyl-cytidine-3'-phosphorothioate
  modified_base 2: mod_base = OTHER; note = 2'-O-methyl-uridine-3'-phosphorothioate
  modified_base 3: mod_base = OTHER; note = 2'-O-methyl-cytidine-3'-phosphate
  modified_base 4: mod_base = OTHER; note = 2'-O-methyl-cytidine-3'-phosphate
  modified_base 5: mod_base = OTHER; note = 2'-deoxy-2'-fluoro-uridine-3'-phosphate
  modified_base 6: mod_base = OTHER; note = 2'-O-methyl-cytidine-3'-phosphate
  modified_base 7: mod_base = OTHER; note = 2'-deoxy-2'-fluoro-adenosine-3'-phosphate
  modified_base 8: mod_base = OTHER; note = 2'-deoxy-2'-fluoro-cytidine-3'-phosphate
  modified_base 9: mod_base = OTHER; note = 2'-deoxy-2'-fluoro-adenosine-3'-phosphate
  modified_base 10: mod_base = OTHER; note = 2'-O-methyl-uridine-3'-phosphate
  modified_base 11: mod_base = OTHER; note = 2'-O-methyl-cytidine-3'-phosphate
  modified_base 12: mod_base = OTHER; note = 2'-O-methyl-uridine-3'-phosphate
  modified_base 13: mod_base = OTHER; note = 2'-O-methyl-guanosine-3'-phosphate
  modified_base 14: mod_base = OTHER; note = 2'-O-methyl-uridine-3'-phosphate
  modified_base 15: mod_base = OTHER; note = 2'-O-methyl-uridine-3'-phosphate
  modified_base 16: mod_base = OTHER; note = 2'-O-methyl-adenosine-3'-phosphate
  modified_base 17: mod_base = OTHER; note = 2'-O-methyl-uridine-3'-phosphate
  modified_base 18: mod_base = OTHER; note = 2'-O-methyl-cytidine-3'-phosphate
  modified_base 19: mod_base = OTHER; note = 2'-O-methyl-adenosine-3'-phosphate
ctcctcacatctgttatca

SEQ ID NO: 1726 - RNA, 19 nt, synthetic construct
  source 1..19: mol_type = other RNA
  modified_base 1: mod_base = OTHER; note = 2'-O-methyl-uridine-3'-phosphorothioate
  modified_base 2: mod_base = OTHER; note = 2'-O-methyl-cytidine-3'-phosphorothioate
  modified_base 3: mod_base = OTHER; note = 2'-O-methyl-cytidine-3'-phosphate
  modified_base 4: mod_base = OTHER; note = 2'-O-methyl-uridine-3'-phosphate
  modified_base 5: mod_base = OTHER; note = 2'-deoxy-2'-fluoro-cytidine-3'-phosphate
  modified_base 6: mod_base = OTHER; note = 2'-O-methyl-adenosine-3'-phosphate
  modified_base 7: mod_base = OTHER; note = 2'-deoxy-2'-fluoro-cytidine-3'-phosphate
  modified_base 8: mod_base = OTHER; note = 2'-deoxy-2'-fluoro-adenosine-3'-phosphate
  modified_base 9: mod_base = OTHER; note = 2'-deoxy-2'-fluoro-uridine-3'-phosphate
  modified_base 10: mod_base = OTHER; note = 2'-O-methyl-cytidine-3'-phosphate
  modified_base 11: mod_base = OTHER; note = 2'-O-methyl-uridine-3'-phosphate
  modified_base 12: mod_base = OTHER; note = 2'-O-methyl-guanosine-3'-phosphate
  modified_base 13: mod_base = OTHER; note = 2'-O-methyl-uridine-3'-phosphate
  modified_base 14: mod_base = OTHER; note = 2'-O-methyl-uridine-3'-phosphate
  modified_base 15: mod_base = OTHER; note = 2'-O-methyl-adenosine-3'-phosphate
  modified_base 16: mod_base = OTHER; note = 2'-O-methyl-uridine-3'-phosphate
  modified_base 17: mod_base = OTHER; note = 2'-O-methyl-cytidine-3'-phosphate
  modified_base 18: mod_base = OTHER; note = 2'-O-methyl-uridine-3'-phosphate
  modified_base 19: mod_base = OTHER; note = 2'-O-methyl-adenosine-3'-phosphate
tcctcacatctgttatcta

SEQ ID NO: 1727 - RNA, 19 nt, synthetic construct
  source 1..19: mol_type = other RNA
  modified_base 1: mod_base = OTHER; note = 2'-O-methyl-uridine-3'-phosphorothioate
  modified_base 2: mod_base = OTHER; note = 2'-O-methyl-cytidine-3'-phosphorothioate
  modified_base 3: mod_base = OTHER; note = 2'-O-methyl-uridine-3'-phosphate
  modified_base 4: mod_base = OTHER; note = 2'-O-methyl-adenosine-3'-phosphate
  modified_base 5: mod_base = OTHER; note = 2'-deoxy-2'-fluoro-uridine-3'-phosphate
  modified_base 6: mod_base = OTHER; note = 2'-O-methyl-guanosine-3'-phosphate
  modified_base 7: mod_base = OTHER; note = 2'-deoxy-2'-fluoro-cytidine-3'-phosphate
  modified_base 8: mod_base = OTHER; note = 2'-deoxy-2'-fluoro-cytidine-3'-phosphate
  modified_base 9: mod_base = OTHER; note = 2'-deoxy-2'-fluoro-adenosine-3'-phosphate
  modified_base 10: mod_base = OTHER; note = 2'-O-methyl-cytidine-3'-phosphate
  modified_base 11: mod_base = OTHER; note = 2'-O-methyl-adenosine-3'-phosphate
  modified_base 12: mod_base = OTHER; note = 2'-O-methyl-uridine-3'-phosphate
  modified_base 13: mod_base = OTHER; note = 2'-O-methyl-uridine-3'-phosphate
  modified_base 14: mod_base = OTHER; note = 2'-O-methyl-adenosine-3'-phosphate
  modified_base 15: mod_base = OTHER; note = 2'-O-methyl-adenosine-3'-phosphate
  modified_base 16: mod_base = OTHER; note = 2'-O-methyl-cytidine-3'-phosphate
  modified_base 17: mod_base = OTHER; note = 2'-O-methyl-adenosine-3'-phosphate
  modified_base 18: mod_base = OTHER; note = 2'-O-methyl-uridine-3'-phosphate
  modified_base 19: mod_base = OTHER; note = 2'-O-methyl-adenosine-3'-phosphate
tctatgccacattaacata

SEQ ID NO: 1728 - RNA, 19 nt, synthetic construct
  source 1..19: mol_type = other RNA
  modified_base 1: mod_base = OTHER; note = 2'-O-methyl-uridine-3'-phosphorothioate
  modified_base 2: mod_base = OTHER; note = 2'-O-methyl-uridine-3'-phosphorothioate
  modified_base 3: mod_base = OTHER; note = 2'-O-methyl-adenosine-3'-phosphate
  modified_base 4: mod_base = OTHER; note = 2'-O-methyl-adenosine-3'-phosphate
  modified_base 5: mod_base = OTHER; note = 2'-deoxy-2'-fluoro-adenosine-3'-phosphate
  modified_base 6: mod_base = OTHER; note = 2'-O-methyl-guanosine-3'-phosphate
  modified_base 7: mod_base = OTHER; note = 2'-deoxy-2'-fluoro-uridine-3'-phosphate
  modified_base 8: mod_base = OTHER; note = 2'-deoxy-2'-fluoro-uridine-3'-phosphate
  modified_base 9: mod_base = OTHER; note = 2'-deoxy-2'-fluoro-guanosine-3'-phosphate
  modified_base 10: mod_base = OTHER; note = 2'-O-methyl-adenosine-3'-phosphate
  modified_base 11: mod_base = OTHER; note = 2'-O-methyl-uridine-3'-phosphate
  modified_base 12: mod_base = OTHER; note = 2'-O-methyl-guanosine-3'-phosphate
  modified_base 13: mod_base = OTHER; note = 2'-O-methyl-adenosine-3'-phosphate
  modified_base 14: mod_base = OTHER; note = 2'-O-methyl-guanosine-3'-phosphate
  modified_base 15: mod_base = OTHER; note = 2'-O-methyl-adenosine-3'-phosphate
  modified_base 16: mod_base = OTHER; note = 2'-O-methyl-adenosine-3'-phosphate
  modified_base 17: mod_base = OTHER; note = 2'-O-methyl-uridine-3'-phosphate
  modified_base 18: mod_base = OTHER; note = 2'-O-methyl-cytidine-3'-phosphate
  modified_base 19: mod_base = OTHER; note = 2'-O-methyl-adenosine-3'-phosphate
ttaaagttgatgagaatca

SEQ ID NO: 1729 - RNA, 19 nt, synthetic construct
  source 1..19: mol_type = other RNA
  modified_base 1: mod_base = OTHER; note = 2'-O-methyl-guanosine-3'-phosphorothioate
  modified_base 2: mod_base = OTHER; note = 2'-O-methyl-adenosine-3'-phosphorothioate
  modified_base 3: mod_base = OTHER; note = 2'-O-methyl-uridine-3'-phosphate
  modified_base 4: mod_base = OTHER; note = 2'-O-methyl-guanosine-3'-phosphate
  modified_base 5: mod_base = OTHER; note = 2'-deoxy-2'-fluoro-adenosine-3'-phosphate
  modified_base 6: mod_base = OTHER; note = 2'-O-methyl-guanosine-3'-phosphate
  modified_base 7: mod_base = OTHER; note = 2'-deoxy-2'-fluoro-adenosine-3'-phosphate
  modified_base 8: mod_base = OTHER; note = 2'-deoxy-2'-fluoro-adenosine-3'-phosphate
  modified_base 9: mod_base = OTHER; note = 2'-deoxy-2'-fluoro-uridine-3'-phosphate
  modified_base 10: mod_base = OTHER; note = 2'-O-methyl-cytidine-3'-phosphate
  modified_base 11: mod_base = OTHER; note = 2'-O-methyl-adenosine-3'-phosphate
  modified_base 12: mod_base = OTHER; note = 2'-O-methyl-adenosine-3'-phosphate
  modified_base 13: mod_base = OTHER; note = 2'-O-methyl-guanosine-3'-phosphate
  modified_base 14: mod_base = OTHER; note = 2'-O-methyl-uridine-3'-phosphate
  modified_base 15: mod_base = OTHER; note = 2'-O-methyl-adenosine-3'-phosphate
  modified_base 16: mod_base = OTHER; note = 2'-O-methyl-uridine-3'-phosphate
  modified_base 17: mod_base = OTHER; note = 2'-O-methyl-guanosine-3'-phosphate
  modified_base 18: mod_base = OTHER; note = 2'-O-methyl-guanosine-3'-phosphate
  modified_base 19: mod_base = OTHER; note = 2'-O-methyl-adenosine-3'-phosphate
gatgagaatcaagtatgga

SEQ ID NO: 1730 - RNA, 19 nt, synthetic construct
  source 1..19: mol_type = other RNA
  modified_base 1: mod_base = OTHER; note = 2'-O-methyl-adenosine-3'-phosphorothioate
  modified_base 2: mod_base = OTHER; note = 2'-O-methyl-uridine-3'-phosphorothioate
  modified_base 3: mod_base = OTHER; note = 2'-O-methyl-guanosine-3'-phosphate
  modified_base 4: mod_base = OTHER; note = 2'-O-methyl-adenosine-3'-phosphate
  modified_base 5: mod_base = OTHER; note = 2'-deoxy-2'-fluoro-guanosine-3'-phosphate
  modified_base 6: mod_base = OTHER; note = 2'-O-methyl-adenosine-3'-phosphate
  modified_base 7: mod_base = OTHER; note = 2'-deoxy-2'-fluoro-adenosine-3'-phosphate
  modified_base 8: mod_base = OTHER; note = 2'-deoxy-2'-fluoro-uridine-3'-phosphate
  modified_base 9: mod_base = OTHER; note = 2'-deoxy-2'-fluoro-cytidine-3'-phosphate
  modified_base 10: mod_base = OTHER; note = 2'-O-methyl-adenosine-3'-phosphate
  modified_base 11: mod_base = OTHER; note = 2'-O-methyl-adenosine-3'-phosphate
  modified_base 12: mod_base = OTHER; note = 2'-O-methyl-guanosine-3'-phosphate
  modified_base 13: mod_base = OTHER; note = 2'-O-methyl-uridine-3'-phosphate
  modified_base 14: mod_base = OTHER; note = 2'-O-methyl-adenosine-3'-phosphate
  modified_base 15: mod_base = OTHER; note = 2'-O-methyl-uridine-3'-phosphate
  modified_base 16: mod_base = OTHER; note = 2'-O-methyl-guanosine-3'-phosphate
  modified_base 17: mod_base = OTHER; note = 2'-O-methyl-guanosine-3'-phosphate
  modified_base 18: mod_base = OTHER; note = 2'-O-methyl-adenosine-3'-phosphate
  modified_base 19: mod_base = OTHER; note = 2'-O-methyl-adenosine-3'-phosphate
atgagaatcaagtatggaa

SEQ ID NO: 1731 - RNA, 19 nt, synthetic construct
  source 1..19: mol_type = other RNA
  modified_base 1: mod_base = OTHER; note = 2'-O-methyl-guanosine-3'-phosphorothioate
  modified_base 2: mod_base = OTHER; note = 2'-O-methyl-adenosine-3'-phosphorothioate
  modified_base 3: mod_base = OTHER; note = 2'-O-methyl-guanosine-3'-phosphate
  modified_base 4: mod_base = OTHER; note = 2'-O-methyl-adenosine-3'-phosphate
  modified_base 5: mod_base = OTHER; note = 2'-deoxy-2'-fluoro-adenosine-3'-phosphate
  modified_base 6: mod_base = OTHER; note = 2'-O-methyl-uridine-3'-phosphate
  modified_base 7: mod_base = OTHER; note = 2'-deoxy-2'-fluoro-cytidine-3'-phosphate
  modified_base 8: mod_base = OTHER; note = 2'-deoxy-2'-fluoro-adenosine-3'-phosphate
  modified_base 9: mod_base = OTHER; note = 2'-deoxy-2'-fluoro-adenosine-3'-phosphate
  modified_base 10: mod_base = OTHER; note = 2'-O-methyl-guanosine-3'-phosphate
  modified_base 11: mod_base = OTHER; note = 2'-O-methyl-uridine-3'-phosphate
  modified_base 12: mod_base = OTHER; note = 2'-O-methyl-adenosine-3'-phosphate
  modified_base 13: mod_base = OTHER; note = 2'-O-methyl-uridine-3'-phosphate
  modified_base 14: mod_base = OTHER; note = 2'-O-methyl-guanosine-3'-phosphate
  modified_base 15: mod_base = OTHER; note = 2'-O-methyl-guanosine-3'-phosphate
  modified_base 16: mod_base = OTHER; note = 2'-O-methyl-adenosine-3'-phosphate
  modified_base 17: mod_base = OTHER; note = 2'-O-methyl-adenosine-3'-phosphate
  modified_base 18: mod_base = OTHER; note = 2'-O-methyl-adenosine-3'-phosphate
  modified_base 19: mod_base = OTHER; note = 2'-O-methyl-adenosine-3'-phosphate
gagaatcaagtatggaaaa

SEQ ID NO: 1732 - RNA, 19 nt, synthetic construct
  source 1..19: mol_type = other RNA
  modified_base 1: mod_base = OTHER; note = 2'-O-methyl-adenosine-3'-phosphorothioate
  modified_base 2: mod_base = OTHER; note = 2'-O-methyl-guanosine-3'-phosphorothioate
  modified_base 3: mod_base = OTHER; note = 2'-O-methyl-adenosine-3'-phosphate
  modified_base 4: mod_base = OTHER; note = 2'-O-methyl-adenosine-3'-phosphate
  modified_base 5: mod_base = OTHER; note = 2'-deoxy-2'-fluoro-uridine-3'-phosphate
  modified_base 6: mod_base = OTHER; note = 2'-O-methyl-cytidine-3'-phosphate
  modified_base 7: mod_base = OTHER; note = 2'-deoxy-2'-fluoro-adenosine-3'-phosphate
  modified_base 8: mod_base = OTHER; note = 2'-deoxy-2'-fluoro-adenosine-3'-phosphate
  modified_base 9: mod_base = OTHER; note = 2'-deoxy-2'-fluoro-guanosine-3'-phosphate
  modified_base 10: mod_base = OTHER; note = 2'-O-methyl-uridine-3'-phosphate
  modified_base 11: mod_base = OTHER; note = 2'-O-methyl-adenosine-3'-phosphate
  modified_base 12: mod_base = OTHER; note = 2'-O-methyl-uridine-3'-phosphate
  modified_base 13: mod_base = OTHER; note = 2'-O-methyl-guanosine-3'-phosphate
  modified_base 14: mod_base = OTHER; note = 2'-O-methyl-guanosine-3'-phosphate
  modified_base 15: mod_base = OTHER; note = 2'-O-methyl-adenosine-3'-phosphate
  modified_base 16: mod_base = OTHER; note = 2'-O-methyl-adenosine-3'-phosphate
  modified_base 17: mod_base = OTHER; note = 2'-O-methyl-adenosine-3'-phosphate
  modified_base 18: mod_base = OTHER; note = 2'-O-methyl-adenosine-3'-phosphate
  modified_base 19: mod_base = OTHER; note = 2'-O-methyl-adenosine-3'-phosphate
agaatcaagtatggaaaaa

SEQ ID NO: 1733 - RNA, 19 nt, synthetic construct
  source 1..19: mol_type = other RNA
  modified_base 1: mod_base = OTHER; note = 2'-O-methyl-guanosine-3'-phosphorothioate
  modified_base 2: mod_base = OTHER; note = 2'-O-methyl-adenosine-3'-phosphorothioate
  modified_base 3: mod_base = OTHER; note = 2'-O-methyl-adenosine-3'-phosphate
  modified_base 4: mod_base = OTHER; note = 2'-O-methyl-uridine-3'-phosphate
  modified_base 5: mod_base = OTHER; note = 2'-deoxy-2'-fluoro-cytidine-3'-phosphate
  modified_base 6: mod_base = OTHER; note = 2'-O-methyl-adenosine-3'-phosphate
  modified_base 7: mod_base = OTHER; note = 2'-deoxy-2'-fluoro-adenosine-3'-phosphate
  modified_base 8: mod_base = OTHER; note = 2'-deoxy-2'-fluoro-guanosine-3'-phosphate
  modified_base 9: mod_base = OTHER; note = 2'-deoxy-2'-fluoro-uridine-3'-phosphate
  modified_base 10: mod_base = OTHER; note = 2'-O-methyl-adenosine-3'-phosphate
  modified_base 11: mod_base = OTHER; note = 2'-O-methyl-uridine-3'-phosphate
  modified_base 12: mod_base = OTHER; note = 2'-O-methyl-guanosine-3'-phosphate
  modified_base 13: mod_base = OTHER; note = 2'-O-methyl-guanosine-3'-phosphate
  modified_base 14: mod_base = OTHER; note = 2'-O-methyl-adenosine-3'-phosphate
  modified_base 15: mod_base = OTHER; note = 2'-O-methyl-adenosine-3'-phosphate
  modified_base 16: mod_base = OTHER; note = 2'-O-methyl-adenosine-3'-phosphate
  modified_base 17: mod_base = OTHER; note = 2'-O-methyl-adenosine-3'-phosphate
  modified_base 18: mod_base = OTHER; note = 2'-O-methyl-guanosine-3'-phosphate
  modified_base 19: mod_base = OTHER; note = 2'-O-methyl-adenosine-3'-phosphate
gaatcaagtatggaaaaga

SEQ ID NO: 1734 - RNA, 19 nt, synthetic construct
  source 1..19: mol_type = other RNA
  modified_base 1: mod_base = OTHER; note = 2'-O-methyl-adenosine-3'-phosphorothioate
  modified_base 2: mod_base = OTHER; note = 2'-O-methyl-adenosine-3'-phosphorothioate
  modified_base 3: mod_base = OTHER; note = 2'-O-methyl-uridine-3'-phosphate
  modified_base 4: mod_base = OTHER; note = 2'-O-methyl-cytidine-3'-phosphate
  modified_base 5: mod_base = OTHER; note = 2'-deoxy-2'-fluoro-adenosine-3'-phosphate
  modified_base 6: mod_base = OTHER; note = 2'-O-methyl-adenosine-3'-phosphate
  modified_base 7: mod_base = OTHER; note = 2'-deoxy-2'-fluoro-guanosine-3'-phosphate
  modified_base 8: mod_base = OTHER; note = 2'-deoxy-2'-fluoro-uridine-3'-phosphate
  modified_base 9: mod_base = OTHER; note = 2'-deoxy-2'-fluoro-adenosine-3'-phosphate
  modified_base 10: mod_base = OTHER; note = 2'-O-methyl-uridine-3'-phosphate
  modified_base 11: mod_base = OTHER; note = 2'-O-methyl-guanosine-3'-phosphate
  modified_base 12: mod_base = OTHER; note = 2'-O-methyl-guanosine-3'-phosphate
  modified_base 13: mod_base = OTHER; note = 2'-O-methyl-adenosine-3'-phosphate
  modified_base 14: mod_base = OTHER; note = 2'-O-methyl-adenosine-3'-phosphate
  modified_base 15: mod_base = OTHER; note = 2'-O-methyl-adenosine-3'-phosphate
  modified_base 16: mod_base = OTHER; note = 2'-O-methyl-adenosine-3'-phosphate
  modified_base 17: mod_base = OTHER; note = 2'-O-methyl-guanosine-3'-phosphate
  modified_base 18: mod_base = OTHER; note = 2'-O-methyl-uridine-3'-phosphate
  modified_base 19: mod_base = OTHER; note = 2'-O-methyl-adenosine-3'-phosphate
aatcaagtatggaaaagta

SEQ ID NO: 1735 - RNA, 19 nt, synthetic construct
  source 1..19: mol_type = other RNA
  modified_base 1: mod_base = OTHER; note = 2'-O-methyl-adenosine-3'-phosphorothioate
  modified_base 2: mod_base = OTHER; note = 2'-O-methyl-uridine-3'-phosphorothioate
  modified_base 3: mod_base = OTHER; note = 2'-O-methyl-cytidine-3'-phosphate
  modified_base 4: mod_base = OTHER; note = 2'-O-methyl-adenosine-3'-phosphate
  modified_base 5: mod_base = OTHER; note = 2'-deoxy-2'-fluoro-adenosine-3'-phosphate
  modified_base 6: mod_base = OTHER; note = 2'-O-methyl-guanosine-3'-phosphate
  modified_base 7: mod_base = OTHER; note = 2'-deoxy-2'-fluoro-uridine-3'-phosphate
  modified_base 8: mod_base = OTHER; note = 2'-deoxy-2'-fluoro-adenosine-3'-phosphate
  modified_base 9: mod_base = OTHER; note = 2'-deoxy-2'-fluoro-uridine-3'-phosphate
  modified_base 10: mod_base = OTHER; note = 2'-O-methyl-guanosine-3'-phosphate
  modified_base 11: mod_base = OTHER; note = 2'-O-methyl-guanosine-3'-phosphate
  modified_base 12: mod_base = OTHER; note = 2'-O-methyl-adenosine-3'-phosphate
  modified_base 13: mod_base = OTHER; note = 2'-O-methyl-adenosine-3'-phosphate
  modified_base 14: mod_base = OTHER; note = 2'-O-methyl-adenosine-3'-phosphate
  modified_base 15: mod_base = OTHER; note = 2'-O-methyl-adenosine-3'-phosphate
  modified_base 16: mod_base = OTHER; note = 2'-O-methyl-guanosine-3'-phosphate
  modified_base 17: mod_base = OTHER; note = 2'-O-methyl-uridine-3'-phosphate
  modified_base 18: mod_base = OTHER; note = 2'-O-methyl-adenosine-3'-phosphate
  modified_base 19: mod_base = OTHER; note = 2'-O-methyl-adenosine-3'-phosphate
atcaagtatggaaaagtaa

SEQ ID NO: 1736 - RNA, 19 nt, synthetic construct
  source 1..19: mol_type = other RNA
  modified_base 1: mod_base = OTHER; note = 2'-O-methyl-uridine-3'-phosphorothioate
  modified_base 2: mod_base = OTHER; note = 2'-O-methyl-cytidine-3'-phosphorothioate
  modified_base 3: mod_base = OTHER; note = 2'-O-methyl-adenosine-3'-phosphate
  modified_base 4: mod_base = OTHER; note = 2'-O-methyl-adenosine-3'-phosphate
  modified_base 5: mod_base = OTHER; note = 2'-deoxy-2'-fluoro-guanosine-3'-phosphate
  modified_base 6: mod_base = OTHER; note = 2'-O-methyl-uridine-3'-phosphate
  modified_base 7: mod_base = OTHER; note = 2'-deoxy-2'-fluoro-adenosine-3'-phosphate
  modified_base 8: mod_base = OTHER; note = 2'-deoxy-2'-fluoro-uridine-3'-phosphate
  modified_base 9: mod_base = OTHER; note = 2'-deoxy-2'-fluoro-guanosine-3'-phosphate
  modified_base 10: mod_base = OTHER; note = 2'-O-methyl-guanosine-3'-phosphate
  modified_base 11: mod_base = OTHER; note = 2'-O-methyl-adenosine-3'-phosphate
  modified_base 12: mod_base = OTHER; note = 2'-O-methyl-adenosine-3'-phosphate
  modified_base 13: mod_base = OTHER; note = 2'-O-methyl-adenosine-3'-phosphate
  modified_base 14: mod_base = OTHER; note = 2'-O-methyl-adenosine-3'-phosphate
  modified_base 15: mod_base = OTHER; note = 2'-O-methyl-guanosine-3'-phosphate
  modified_base 16: mod_base = OTHER; note = 2'-O-methyl-uridine-3'-phosphate
  modified_base 17: mod_base = OTHER; note = 2'-O-methyl-adenosine-3'-phosphate
  modified_base 18: mod_base = OTHER; note = 2'-O-methyl-adenosine-3'-phosphate
  modified_base 19: mod_base = OTHER; note = 2'-O-methyl-adenosine-3'-phosphate
tcaagtatggaaaagtaaa

SEQ ID NO: 1737 - RNA, 19 nt, synthetic construct
  source 1..19: mol_type = other RNA
  modified_base 1: mod_base = OTHER; note = 2'-O-methyl-cytidine-3'-phosphorothioate
  modified_base 2: mod_base = OTHER; note = 2'-O-methyl-adenosine-3'-phosphorothioate
  modified_base 3: mod_base = OTHER; note = 2'-O-methyl-adenosine-3'-phosphate
  modified_base 4: mod_base = OTHER; note = 2'-O-methyl-guanosine-3'-phosphate
  modified_base 5: mod_base = OTHER; note = 2'-deoxy-2'-fluoro-uridine-3'-phosphate
  modified_base 6: mod_base = OTHER; note = 2'-O-methyl-adenosine-3'-phosphate
  modified_base 7: mod_base = OTHER; note = 2'-deoxy-2'-fluoro-uridine-3'-phosphate
  modified_base 8: mod_base = OTHER; note = 2'-deoxy-2'-fluoro-guanosine-3'-phosphate
  modified_base 9: mod_base = OTHER; note = 2'-deoxy-2'-fluoro-guanosine-3'-phosphate
  modified_base 10: mod_base = OTHER; note = 2'-O-methyl-adenosine-3'-phosphate
  modified_base 11: mod_base = OTHER; note = 2'-O-methyl-adenosine-3'-phosphate
  modified_base 12: mod_base = OTHER; note = 2'-O-methyl-adenosine-3'-phosphate
  modified_base 13: mod_base = OTHER; note = 2'-O-methyl-adenosine-3'-phosphate
  modified_base 14: mod_base = OTHER; note = 2'-O-methyl-guanosine-3'-phosphate
  modified_base 15: mod_base = OTHER; note = 2'-O-methyl-uridine-3'-phosphate
  modified_base 16: mod_base = OTHER; note = 2'-O-methyl-adenosine-3'-phosphate
  modified_base 17: mod_base = OTHER; note = 2'-O-methyl-adenosine-3'-phosphate
  modified_base 18: mod_base = OTHER; note = 2'-O-methyl-guanosine-3'-phosphate
  modified_base 19: mod_base = OTHER; note = 2'-O-methyl-adenosine-3'-phosphate
caagtatggaaaagtaaga

SEQ ID NO: 1738 - RNA, 19 nt, synthetic construct
  source 1..19: mol_type = other RNA
  modified_base 1: mod_base = OTHER; note = 2'-O-methyl-adenosine-3'-phosphorothioate
  modified_base 2: mod_base = OTHER; note = 2'-O-methyl-adenosine-3'-phosphorothioate
  modified_base 3: mod_base = OTHER; note = 2'-O-methyl-guanosine-3'-phosphate
  modified_base 4: mod_base = OTHER; note = 2'-O-methyl-uridine-3'-phosphate
  modified_base 5: mod_base = OTHER; note = 2'-deoxy-2'-fluoro-adenosine-3'-phosphate
  modified_base 6: mod_base = OTHER; note = 2'-O-methyl-uridine-3'-phosphate
  modified_base 7: mod_base = OTHER; note = 2'-deoxy-2'-fluoro-guanosine-3'-phosphate
  modified_base 8: mod_base = OTHER; note = 2'-deoxy-2'-fluoro-guanosine-3'-phosphate
  modified_base 9: mod_base = OTHER; note = 2'-deoxy-2'-fluoro-adenosine-3'-phosphate
  modified_base 10: mod_base = OTHER; note = 2'-O-methyl-adenosine-3'-phosphate
  modified_base 11: mod_base = OTHER; note = 2'-O-methyl-adenosine-3'-phosphate
  modified_base 12: mod_base = OTHER; note = 2'-O-methyl-adenosine-3'-phosphate
  modified_base 13: mod_base = OTHER; note = 2'-O-methyl-guanosine-3'-phosphate
  modified_base 14: mod_base = OTHER; note = 2'-O-methyl-uridine-3'-phosphate
  modified_base 15: mod_base = OTHER; note = 2'-O-methyl-adenosine-3'-phosphate
  modified_base 16: mod_base = OTHER; note = 2'-O-methyl-adenosine-3'-phosphate
  modified_base 17: mod_base = OTHER; note = 2'-O-methyl-guanosine-3'-phosphate
  modified_base 18: mod_base = OTHER; note = 2'-O-methyl-guanosine-3'-phosphate
  modified_base 19: mod_base = OTHER; note = 2'-O-methyl-adenosine-3'-phosphate
aagtatggaaaagtaagga

SEQ ID NO: 1739 - RNA, 19 nt, synthetic construct
  source 1..19: mol_type = other RNA
  modified_base 1: mod_base = OTHER; note = 2'-O-methyl-adenosine-3'-phosphorothioate
  modified_base 2: mod_base = OTHER; note = 2'-O-methyl-guanosine-3'-phosphorothioate
  modified_base 3: mod_base = OTHER; note = 2'-O-methyl-uridine-3'-phosphate
  modified_base 4: mod_base = OTHER; note = 2'-O-methyl-adenosine-3'-phosphate
  modified_base 5: mod_base = OTHER; note = 2'-deoxy-2'-fluoro-uridine-3'-phosphate
  modified_base 6: mod_base = OTHER; note = 2'-O-methyl-guanosine-3'-phosphate
  modified_base 7: mod_base = OTHER; note = 2'-deoxy-2'-fluoro-guanosine-3'-phosphate
  modified_base 8: mod_base = OTHER; note = 2'-deoxy-2'-fluoro-adenosine-3'-phosphate
  modified_base 9: mod_base = OTHER; note = 2'-deoxy-2'-fluoro-adenosine-3'-phosphate
  modified_base 10: mod_base = OTHER; note = 2'-O-methyl-adenosine-3'-phosphate
  modified_base 11: mod_base = OTHER; note = 2'-O-methyl-adenosine-3'-phosphate
  modified_base 12: mod_base = OTHER; note = 2'-O-methyl-guanosine-3'-phosphate
  modified_base 13: mod_base = OTHER; note = 2'-O-methyl-uridine-3'-phosphate
  modified_base 14: mod_base = OTHER; note = 2'-O-methyl-adenosine-3'-phosphate
  modified_base 15: mod_base = OTHER; note = 2'-O-methyl-adenosine-3'-phosphate
  modified_base 16: mod_base = OTHER; note = 2'-O-methyl-guanosine-3'-phosphate
  modified_base 17: mod_base = OTHER; note = 2'-O-methyl-guanosine-3'-phosphate
  modified_base 18: mod_base = OTHER; note = 2'-O-methyl-cytidine-3'-phosphate
  modified_base 19: mod_base = OTHER; note = 2'-O-methyl-adenosine-3'-phosphate
agtatggaaaagtaaggca

SEQ ID NO: 1740 - RNA, 19 nt, synthetic construct
  source 1..19: mol_type = other RNA
  modified_base 1: mod_base = OTHER; note = 2'-O-methyl-guanosine-3'-phosphorothioate
  modified_base 2: mod_base = OTHER; note = 2'-O-methyl-uridine-3'-phosphorothioate
  modified_base 3: mod_base = OTHER; note = 2'-O-methyl-adenosine-3'-phosphate
  modified_base 4: mod_base = OTHER; note = 2'-O-methyl-uridine-3'-phosphate
  modified_base 5: mod_base = OTHER; note = 2'-deoxy-2'-fluoro-guanosine-3'-phosphate
  modified_base 6: mod_base = OTHER; note = 2'-O-methyl-guanosine-3'-phosphate
  modified_base 7: mod_base = OTHER; note = 2'-deoxy-2'-fluoro-adenosine-3'-phosphate
  modified_base 8: mod_base = OTHER; note = 2'-deoxy-2'-fluoro-adenosine-3'-phosphate
  modified_base 9: mod_base = OTHER; note = 2'-deoxy-2'-fluoro-adenosine-3'-phosphate
  modified_base 10: mod_base = OTHER; note = 2'-O-methyl-adenosine-3'-phosphate
  modified_base 11: mod_base = OTHER; note = 2'-O-methyl-guanosine-3'-phosphate
  modified_base 12: mod_base = OTHER; note = 2'-O-methyl-uridine-3'-phosphate
  modified_base 13: mod_base = OTHER; note = 2'-O-methyl-adenosine-3'-phosphate
  modified_base 14: mod_base = OTHER; note = 2'-O-methyl-adenosine-3'-phosphate
  modified_base 15: mod_base = OTHER; note = 2'-O-methyl-guanosine-3'-phosphate
  modified_base 16: mod_base = OTHER; note = 2'-O-methyl-guanosine-3'-phosphate
  modified_base 17: mod_base = OTHER; note = 2'-O-methyl-cytidine-3'-phosphate
  modified_base 18: mod_base = OTHER; note = 2'-O-methyl-cytidine-3'-phosphate
  modified_base 19: mod_base = OTHER; note = 2'-O-methyl-adenosine-3'-phosphate
gtatggaaaagtaaggcca

SEQ ID NO: 1741 - RNA, 19 nt, synthetic construct
  source 1..19: mol_type = other RNA
  modified_base 1: mod_base = OTHER; note = 2'-O-methyl-uridine-3'-phosphorothioate
  modified_base 2: mod_base = OTHER; note = 2'-O-methyl-guanosine-3'-phosphorothioate
  modified_base 3: mod_base = OTHER; note = 2'-O-methyl-guanosine-3'-phosphate
  modified_base 4: mod_base = OTHER; note = 2'-O-methyl-adenosine-3'-phosphate
  modified_base 5: mod_base = OTHER; note = 2'-deoxy-2'-fluoro-adenosine-3'-phosphate
  modified_base 6: mod_base = OTHER; note = 2'-O-methyl-adenosine-3'-phosphate
  modified_base 7: mod_base = OTHER; note = 2'-deoxy-2'-fluoro-adenosine-3'-phosphate
  modified_base 8: mod_base = OTHER; note = 2'-deoxy-2'-fluoro-guanosine-3'-phosphate
  modified_base 9: mod_base = OTHER; note = 2'-deoxy-2'-fluoro-uridine-3'-phosphate
  modified_base 10: mod_base = OTHER; note = 2'-O-methyl-adenosine-3'-phosphate
  modified_base 11: mod_base = OTHER; note = 2'-O-methyl-adenosine-3'-phosphate
  modified_base 12: mod_base = OTHER; note = 2'-O-methyl-guanosine-3'-phosphate
  modified_base 13: mod_base = OTHER; note = 2'-O-methyl-guanosine-3'-phosphate
  modified_base 14: mod_base = OTHER; note = 2'-O-methyl-cytidine-3'-phosphate
  modified_base 15: mod_base = OTHER; note = 2'-O-methyl-cytidine-3'-phosphate
  modified_base 16: mod_base = OTHER; note = 2'-O-methyl-adenosine-3'-phosphate
  modified_base 17: mod_base = OTHER; note = 2'-O-methyl-uridine-3'-phosphate
  modified_base 18: mod_base = OTHER; note = 2'-O-methyl-adenosine-3'-phosphate
  modified_base 19: mod_base = OTHER; note = 2'-O-methyl-adenosine-3'-phosphate
tggaaaagtaaggccataa

SEQ ID NO: 1742 - RNA, 19 nt, synthetic construct
  source 1..19: mol_type = other RNA
  modified_base 1: mod_base = OTHER; note = 2'-O-methyl-adenosine-3'-phosphorothioate
  modified_base 2: mod_base = OTHER; note = 2'-O-methyl-adenosine-3'-phosphorothioate
  modified_base 3: mod_base = OTHER; note = 2'-O-methyl-guanosine-3'-phosphate
  modified_base 4: mod_base = OTHER; note = 2'-O-methyl-guanosine-3'-phosphate
  modified_base 5: mod_base = OTHER; note = 2'-deoxy-2'-fluoro-cytidine-3'-phosphate
  modified_base 6: mod_base = OTHER; note = 2'-O-methyl-cytidine-3'-phosphate
  modified_base 7: mod_base = OTHER; note = 2'-deoxy-2'-fluoro-adenosine-3'-phosphate
  modified_base 8: mod_base = OTHER; note = 2'-deoxy-2'-fluoro-uridine-3'-phosphate
  modified_base 9: mod_base = OTHER; note = 2'-deoxy-2'-fluoro-adenosine-3'-phosphate
  modified_base 10: mod_base = OTHER; note = 2'-O-methyl-cytidine-3'-phosphate
  modified_base 11: mod_base = OTHER; note = 2'-O-methyl-uridine-3'-phosphate
  modified_base 12: mod_base = OTHER; note = 2'-O-methyl-cytidine-3'-phosphate
  modified_base 13: mod_base = OTHER; note = 2'-O-methyl-uridine-3'-phosphate
  modified_base 14: mod_base = OTHER; note = 2'-O-methyl-uridine-3'-phosphate
  modified_base 15: mod_base = OTHER; note = 2'-O-methyl-adenosine-3'-phosphate
  modified_base 16: mod_base = OTHER; note = 2'-O-methyl-cytidine-3'-phosphate
  modified_base 17: mod_base = OTHER; note = 2'-O-methyl-adenosine-3'-phosphate
  modified_base 18: mod_base = OTHER; note = 2'-O-methyl-uridine-3'-phosphate
  modified_base 19: mod_base = OTHER; note = 2'-O-methyl-adenosine-3'-phosphate
aaggccatactcttacata

SEQ ID NO: 1743 - RNA, 19 nt, synthetic construct
  source 1..19: mol_type = other RNA
  modified_base 1: mod_base = OTHER; note = 2'-O-methyl-cytidine-3'-phosphorothioate
  modified_base 2: mod_base = OTHER; note = 2'-O-methyl-cytidine-3'-phosphorothioate
  modified_base 3: mod_base = OTHER; note = 2'-O-methyl-adenosine-3'-phosphate
  modified_base 4: mod_base = OTHER; note = 2'-O-methyl-uridine-3'-phosphate
  modified_base 5: mod_base = OTHER; note = 2'-deoxy-2'-fluoro-adenosine-3'-phosphate
  modified_base 6: mod_base = OTHER; note = 2'-O-methyl-cytidine-3'-phosphate
  modified_base 7: mod_base = OTHER; note = 2'-deoxy-2'-fluoro-uridine-3'-phosphate
  modified_base 8: mod_base = OTHER; note = 2'-deoxy-2'-fluoro-cytidine-3'-phosphate
  modified_base 9: mod_base = OTHER; note = 2'-deoxy-2'-fluoro-uridine-3'-phosphate
  modified_base 10: mod_base = OTHER; note = 2'-O-methyl-uridine-3'-phosphate
  modified_base 11: mod_base = OTHER; note = 2'-O-methyl-adenosine-3'-phosphate
  modified_base 12: mod_base = OTHER; note = 2'-O-methyl-cytidine-3'-phosphate
  modified_base 13: mod_base = OTHER; note = 2'-O-methyl-adenosine-3'-phosphate
  modified_base 14: mod_base = OTHER; note = 2'-O-methyl-uridine-3'-phosphate
  modified_base 15: mod_base = OTHER; note = 2'-O-methyl-adenosine-3'-phosphate
  modified_base 16: mod_base = OTHER; note = 2'-O-methyl-adenosine-3'-phosphate
  modified_base 17: mod_base = OTHER; note = 2'-O-methyl-uridine-3'-phosphate
  modified_base 18: mod_base = OTHER; note = 2'-O-methyl-adenosine-3'-phosphate
  modified_base 19: mod_base = OTHER; note = 2'-O-methyl-adenosine-3'-phosphate
ccatactcttacataataa

SEQ ID NO: 1744 - RNA, 19 nt, synthetic construct
  source 1..19: mol_type = other RNA
  modified_base 1: mod_base = OTHER; note = 2'-O-methyl-uridine-3'-phosphorothioate
  modified_base 2: mod_base = OTHER; note = 2'-O-methyl-uridine-3'-phosphorothioate
  modified_base 3: mod_base = OTHER; note = 2'-O-methyl-uridine-3'-phosphate
  modified_base 4: mod_base = OTHER; note = 2'-O-methyl-uridine-3'-phosphate
  modified_base 5: mod_base = OTHER; note = 2'-deoxy-2'-fluoro-cytidine-3'-phosphate
  modified_base 6: mod_base = OTHER; note = 2'-O-methyl-adenosine-3'-phosphate
  modified_base 7: mod_base = OTHER; note = 2'-deoxy-2'-fluoro-adenosine-3'-phosphate
  modified_base 8: mod_base = OTHER; note = 2'-deoxy-2'-fluoro-adenosine-3'-phosphate
  modified_base 9: mod_base = OTHER; note = 2'-deoxy-2'-fluoro-guanosine-3'-phosphate
  modified_base 10: mod_base = OTHER; note = 2'-O-methyl-adenosine-3'-phosphate
  modified_base 11: mod_base = OTHER; note = 2'-O-methyl-adenosine-3'-phosphate
  modified_base 12: mod_base = OTHER; note = 2'-O-methyl-uridine-3'-phosphate
  modified_base 13: mod_base = OTHER; note = 2'-O-methyl-cytidine-3'-phosphate
  modified_base 14: mod_base = OTHER; note = 2'-O-methyl-adenosine-3'-phosphate
  modified_base 15: mod_base = OTHER; note = 2'-O-methyl-cytidine-3'-phosphate
  modified_base 16: mod_base = OTHER; note = 2'-O-methyl-adenosine-3'-phosphate
  modified_base 17: mod_base = OTHER; note = 2'-O-methyl-guanosine-3'-phosphate
  modified_base 18: mod_base = OTHER; note = 2'-O-methyl-adenosine-3'-phosphate
  modified_base 19: mod_base = OTHER; note = 2'-O-methyl-adenosine-3'-phosphate
ttttcaaagaatcacagaa

SEQ ID NO: 1745 - RNA, 19 nt, synthetic construct
  source 1..19: mol_type = other RNA
  modified_base 1: mod_base = OTHER; note = 2'-O-methyl-uridine-3'-phosphorothioate
  modified_base 2: mod_base = OTHER; note = 2'-O-methyl-uridine-3'-phosphorothioate
  modified_base 3: mod_base = OTHER; note = 2'-O-methyl-uridine-3'-phosphate
  modified_base 4: mod_base = OTHER; note = 2'-O-methyl-cytidine-3'-phosphate
  modified_base 5: mod_base = OTHER; note = 2'-deoxy-2'-fluoro-adenosine-3'-phosphate
  modified_base 6: mod_base = OTHER; note = 2'-O-methyl-adenosine-3'-phosphate
  modified_base 7: mod_base = OTHER; note = 2'-deoxy-2'-fluoro-adenosine-3'-phosphate
  modified_base 8: mod_base = OTHER; note = 2'-deoxy-2'-fluoro-guanosine-3'-phosphate
  modified_base 9: mod_base = OTHER; note = 2'-deoxy-2'-fluoro-adenosine-3'-phosphate
  modified_base 10: mod_base = OTHER; note = 2'-O-methyl-adenosine-3'-phosphate
  modified_base 11: mod_base = OTHER; note = 2'-O-methyl-uridine-3'-phosphate
  modified_base 12: mod_base = OTHER; note = 2'-O-methyl-cytidine-3'-phosphate
  modified_base 13: mod_base = OTHER; note = 2'-O-methyl-adenosine-3'-phosphate
  modified_base 14: mod_base = OTHER; note = 2'-O-methyl-cytidine-3'-phosphate
  modified_base 15: mod_base = OTHER; note = 2'-O-methyl-adenosine-3'-phosphate
  modified_base 16: mod_base = OTHER; note = 2'-O-methyl-guanosine-3'-phosphate
  modified_base 17: mod_base = OTHER; note = 2'-O-methyl-adenosine-3'-phosphate
  modified_base 18: mod_base = OTHER; note = 2'-O-methyl-adenosine-3'-phosphate
  modified_base 19: mod_base = OTHER; note = 2'-O-methyl-adenosine-3'-phosphate
tttcaaagaatcacagaaa

SEQ ID NO: 1746 - RNA, 19 nt, synthetic construct
  source 1..19: mol_type = other RNA
  modified_base 1: mod_base = OTHER; note = 2'-O-methyl-uridine-3'-phosphorothioate
  modified_base 2: mod_base = OTHER; note = 2'-O-methyl-uridine-3'-phosphorothioate
  modified_base 3: mod_base = OTHER; note = 2'-O-methyl-cytidine-3'-phosphate
  modified_base 4: mod_base = OTHER; note = 2'-O-methyl-adenosine-3'-phosphate
  modified_base 5: mod_base = OTHER; note = 2'-deoxy-2'-fluoro-adenosine-3'-phosphate
  modified_base 6: mod_base = OTHER; note = 2'-O-methyl-adenosine-3'-phosphate
  modified_base 7: mod_base = OTHER; note = 2'-deoxy-2'-fluoro-guanosine-3'-phosphate
  modified_base 8: mod_base = OTHER; note = 2'-deoxy-2'-fluoro-adenosine-3'-phosphate
  modified_base 9: mod_base = OTHER; note = 2'-deoxy-2'-fluoro-adenosine-3'-phosphate
  modified_base 10: mod_base = OTHER; note = 2'-O-methyl-uridine-3'-phosphate
  modified_base 11: mod_base = OTHER; note = 2'-O-methyl-cytidine-3'-phosphate
  modified_base 12: mod_base = OTHER; note = 2'-O-methyl-adenosine-3'-phosphate
  modified_base 13: mod_base = OTHER; note = 2'-O-methyl-cytidine-3'-phosphate
  modified_base 14: mod_base = OTHER; note = 2'-O-methyl-adenosine-3'-phosphate
  modified_base 15: mod_base = OTHER; note = 2'-O-methyl-guanosine-3'-phosphate
  modified_base 16: mod_base = OTHER; note = 2'-O-methyl-adenosine-3'-phosphate
  modified_base 17: mod_base = OTHER; note = 2'-O-methyl-adenosine-3'-phosphate
  modified_base 18: mod_base = OTHER; note = 2'-O-methyl-uridine-3'-phosphate
  modified_base 19: mod_base = OTHER; note = 2'-O-methyl-adenosine-3'-phosphate
ttcaaagaatcacagaata

SEQ ID NO: 1747 - RNA, 19 nt, synthetic construct
  source 1..19: mol_type = other RNA
  modified_base 1: mod_base = OTHER; note = 2'-O-methyl-adenosine-3'-phosphorothioate
  modified_base 2: mod_base = OTHER; note = 2'-O-methyl-adenosine-3'-phosphorothioate
  modified_base 3: mod_base = OTHER; note = 2'-O-methyl-uridine-3'-phosphate
  modified_base 4: mod_base = OTHER; note = 2'-O-methyl-cytidine-3'-phosphate
  modified_base 5: mod_base = OTHER; note = 2'-deoxy-2'-fluoro-adenosine-3'-phosphate
  modified_base 6: mod_base = OTHER; note = 2'-O-methyl-cytidine-3'-phosphate
  modified_base 7: mod_base = OTHER; note = 2'-deoxy-2'-fluoro-adenosine-3'-phosphate
  modified_base 8: mod_base = OTHER; note = 2'-deoxy-2'-fluoro-guanosine-3'-phosphate
  modified_base 9: mod_base = OTHER; note = 2'-deoxy-2'-fluoro-adenosine-3'-phosphate
  modified_base 10: mod_base = OTHER; note = 2'-O-methyl-adenosine-3'-phosphate
  modified_base 11: mod_base = OTHER; note = 2'-O-methyl-uridine-3'-phosphate
  modified_base 12: mod_base = OTHER; note = 2'-O-methyl-uridine-3'-phosphate
  modified_base 13: mod_base = OTHER; note = 2'-O-methyl-cytidine-3'-phosphate
  modified_base 14: mod_base = OTHER; note = 2'-O-methyl-uridine-3'-phosphate
  modified_base 15: mod_base = OTHER; note = 2'-O-methyl-adenosine-3'-phosphate
  modified_base 16: mod_base = OTHER; note = 2'-O-methyl-guanosine-3'-phosphate
  modified_base 17: mod_base = OTHER; note = 2'-O-methyl-uridine-3'-phosphate
  modified_base 18: mod_base = OTHER; note = 2'-O-methyl-adenosine-3'-phosphate
  modified_base 19: mod_base = OTHER; note = 2'-O-methyl-adenosine-3'-phosphate
aatcacagaattctagtaa

SEQ ID NO: 1748 - RNA, 19 nt, synthetic construct
  source 1..19: mol_type = other RNA
  modified_base 1: mod_base = OTHER; note = 2'-O-methyl-adenosine-3'-phosphorothioate
  modified_base 2: mod_base = OTHER; note = 2'-O-methyl-uridine-3'-phosphorothioate
  modified_base 3: mod_base = OTHER; note = 2'-O-methyl-cytidine-3'-phosphate
  modified_base 4: mod_base = OTHER; note = 2'-O-methyl-adenosine-3'-phosphate
  modified_base 5: mod_base = OTHER; note = 2'-deoxy-2'-fluoro-cytidine-3'-phosphate
  modified_base 6: mod_base = OTHER; note = 2'-O-methyl-adenosine-3'-phosphate
  modified_base 7: mod_base = OTHER; note = 2'-deoxy-2'-fluoro-guanosine-3'-phosphate
  modified_base 8: mod_base = OTHER; note = 2'-deoxy-2'-fluoro-adenosine-3'-phosphate
  modified_base 9: mod_base = OTHER; note = 2'-deoxy-2'-fluoro-adenosine-3'-phosphate
  modified_base 10: mod_base = OTHER; note = 2'-O-methyl-uridine-3'-phosphate
  modified_base 11: mod_base = OTHER; note = 2'-O-methyl-uridine-3'-phosphate
  modified_base 12: mod_base = OTHER; note = 2'-O-methyl-cytidine-3'-phosphate
  modified_base 13: mod_base = OTHER; note = 2'-O-methyl-uridine-3'-phosphate
  modified_base 14: mod_base = OTHER; note = 2'-O-methyl-adenosine-3'-phosphate
  modified_base 15: mod_base = OTHER; note = 2'-O-methyl-guanosine-3'-phosphate
  modified_base 16: mod_base = OTHER; note = 2'-O-methyl-uridine-3'-phosphate
  modified_base 17: mod_base = OTHER; note = 2'-O-methyl-adenosine-3'-phosphate
  modified_base 18: mod_base = OTHER; note = 2'-O-methyl-cytidine-3'-phosphate
  modified_base 19: mod_base = OTHER; note = 2'-O-methyl-adenosine-3'-phosphate
atcacagaattctagtaca

SEQ ID NO: 1749 - RNA, 19 nt, synthetic construct
  source 1..19: mol_type = other RNA
  modified_base 1: mod_base = OTHER; note = 2'-O-methyl-uridine-3'-phosphorothioate
  modified_base 2: mod_base = OTHER; note = 2'-O-methyl-cytidine-3'-phosphorothioate
  modified_base 3: mod_base = OTHER; note = 2'-O-methyl-adenosine-3'-phosphate
  modified_base 4: mod_base = OTHER; note = 2'-O-methyl-uridine-3'-phosphate
  modified_base 5: mod_base = OTHER; note = 2'-deoxy-2'-fluoro-adenosine-3'-phosphate
  modified_base 6: mod_base = OTHER; note = 2'-O-methyl-adenosine-3'-phosphate
  modified_base 7: mod_base = OTHER; note = 2'-deoxy-2'-fluoro-adenosine-3'-phosphate
  modified_base 8: mod_base = OTHER; note = 2'-deoxy-2'-fluoro-uridine-3'-phosphate
  modified_base 9: mod_base = OTHER; note = 2'-deoxy-2'-fluoro-cytidine-3'-phosphate
  modified_base 10: mod_base = OTHER; note = 2'-O-methyl-uridine-3'-phosphate
  modified_base 11: mod_base = OTHER; note = 2'-O-methyl-guanosine-3'-phosphate
  modified_base 12: mod_base = OTHER; note = 2'-O-methyl-uridine-3'-phosphate
  modified_base 13: mod_base = OTHER; note = 2'-O-methyl-uridine-3'-phosphate
  modified_base 14: mod_base = OTHER; note = 2'-O-methyl-cytidine-3'-phosphate
  modified_base 15: mod_base = OTHER; note = 2'-O-methyl-uridine-3'-phosphate
  modified_base 16: mod_base = OTHER; note = 2'-O-methyl-adenosine-3'-phosphate
  modified_base 17: mod_base = OTHER; note = 2'-O-methyl-adenosine-3'-phosphate
  modified_base 18: mod_base = OTHER; note = 2'-O-methyl-guanosine-3'-phosphate
  modified_base 19: mod_base = OTHER; note = 2'-O-methyl-adenosine-3'-phosphate
tcataaatctgttctaaga

SEQ ID NO: 1750 - RNA, 19 nt, synthetic construct
  source 1..19: mol_type = other RNA
  modified_base 1: mod_base = OTHER; note = 2'-O-methyl-cytidine-3'-phosphorothioate
  modified_base 2: mod_base = OTHER; note = 2'-O-methyl-adenosine-3'-phosphorothioate
  modified_base 3: mod_base = OTHER; note = 2'-O-methyl-uridine-3'-phosphate
  modified_base 4: mod_base = OTHER; note = 2'-O-methyl-adenosine-3'-phosphate
  modified_base 5: mod_base = OTHER; note = 2'-deoxy-2'-fluoro-adenosine-3'-phosphate
  modified_base 6: mod_base = OTHER; note = 2'-O-methyl-adenosine-3'-phosphate
  modified_base 7: mod_base = OTHER; note = 2'-deoxy-2'-fluoro-uridine-3'-phosphate
  modified_base 8: mod_base = OTHER; note = 2'-deoxy-2'-fluoro-cytidine-3'-phosphate
  modified_base 9: mod_base = OTHER; note = 2'-deoxy-2'-fluoro-uridine-3'-phosphate
  modified_base 10: mod_base = OTHER; note = 2'-O-methyl-guanosine-3'-phosphate
  modified_base 11: mod_base = OTHER; note = 2'-O-methyl-uridine-3'-phosphate
  modified_base 12: mod_base = OTHER; note = 2'-O-methyl-uridine-3'-phosphate
  modified_base 13: mod_base = OTHER; note = 2'-O-methyl-cytidine-3'-phosphate
  modified_base 14: mod_base = OTHER; note = 2'-O-methyl-uridine-3'-phosphate
  modified_base 15: mod_base = OTHER; note = 2'-O-methyl-adenosine-3'-phosphate
  modified_base 16: mod_base = OTHER; note = 2'-O-methyl-adenosine-3'-phosphate
  modified_base 17: mod_base = OTHER; note = 2'-O-methyl-guanosine-3'-phosphate
  modified_base 18: mod_base = OTHER; note = 2'-O-methyl-adenosine-3'-phosphate
  modified_base 19: mod_base = OTHER; note = 2'-O-methyl-adenosine-3'-phosphate
cataaatctgttctaagaa

SEQ ID NO: 1751 - RNA, 19 nt, synthetic construct
  source 1..19: mol_type = other RNA
  modified_base 1: mod_base = OTHER; note = 2'-O-methyl-adenosine-3'-phosphorothioate
  modified_base 2: mod_base = OTHER; note = 2'-O-methyl-uridine-3'-phosphorothioate
  modified_base 3: mod_base = OTHER; note = 2'-O-methyl-adenosine-3'-phosphate
  modified_base 4: mod_base = OTHER; note = 2'-O-methyl-adenosine-3'-phosphate
  modified_base 5: mod_base = OTHER; note = 2'-deoxy-2'-fluoro-adenosine-3'-phosphate
  modified_base 6: mod_base = OTHER; note = 2'-O-methyl-uridine-3'-phosphate
  modified_base 7: mod_base = OTHER; note = 2'-deoxy-2'-fluoro-cytidine-3'-phosphate
  modified_base 8: mod_base = OTHER; note = 2'-deoxy-2'-fluoro-uridine-3'-phosphate
  modified_base 9: mod_base = OTHER; note = 2'-deoxy-2'-fluoro-guanosine-3'-phosphate
  modified_base 10: mod_base = OTHER; note = 2'-O-methyl-uridine-3'-phosphate
  modified_base 11: mod_base = OTHER; note = 2'-O-methyl-uridine-3'-phosphate
  modified_base 12: mod_base = OTHER; note = 2'-O-methyl-cytidine-3'-phosphate
  modified_base 13: mod_base = OTHER; note = 2'-O-methyl-uridine-3'-phosphate
  modified_base 14: mod_base = OTHER; note = 2'-O-methyl-adenosine-3'-phosphate
  modified_base 15: mod_base = OTHER; note = 2'-O-methyl-adenosine-3'-phosphate
  modified_base 16: mod_base = OTHER; note = 2'-O-methyl-guanosine-3'-phosphate
  modified_base 17: mod_base = OTHER; note = 2'-O-methyl-adenosine-3'-phosphate
  modified_base 18: mod_base = OTHER; note = 2'-O-methyl-cytidine-3'-phosphate
  modified_base 19: mod_base = OTHER; note = 2'-O-methyl-adenosine-3'-phosphate
ataaatctgttctaagaca

SEQ ID NO: 1752 - RNA, 19 nt, synthetic construct
  source 1..19: mol_type = other RNA
  modified_base 1: mod_base = OTHER; note = 2'-O-methyl-uridine-3'-phosphorothioate
  modified_base 2: mod_base = OTHER; note = 2'-O-methyl-adenosine-3'-phosphorothioate
  modified_base 3: mod_base = OTHER; note = 2'-O-methyl-adenosine-3'-phosphate
  modified_base 4: mod_base = OTHER; note = 2'-O-methyl-adenosine-3'-phosphate
  modified_base 5: mod_base = OTHER; note = 2'-deoxy-2'-fluoro-uridine-3'-phosphate
  modified_base 6: mod_base = OTHER; note = 2'-O-methyl-cytidine-3'-phosphate
  modified_base 7: mod_base = OTHER; note = 2'-deoxy-2'-fluoro-uridine-3'-phosphate
  modified_base 8: mod_base = OTHER; note = 2'-deoxy-2'-fluoro-guanosine-3'-phosphate
  modified_base 9: mod_base = OTHER; note = 2'-deoxy-2'-fluoro-uridine-3'-phosphate
  modified_base 10: mod_base = OTHER; note = 2'-O-methyl-uridine-3'-phosphate
  modified_base 11: mod_base = OTHER; note = 2'-O-methyl-cytidine-3'-phosphate
  modified_base 12: mod_base = OTHER; note = 2'-O-methyl-uridine-3'-phosphate
  modified_base 13: mod_base = OTHER; note = 2'-O-methyl-adenosine-3'-phosphate
  modified_base 14: mod_base = OTHER; note = 2'-O-methyl-adenosine-3'-phosphate
  modified_base 15: mod_base = OTHER; note = 2'-O-methyl-guanosine-3'-phosphate
  modified_base 16: mod_base = OTHER; note = 2'-O-methyl-adenosine-3'-phosphate
  modified_base 17: mod_base = OTHER; note = 2'-O-methyl-cytidine-3'-phosphate
  modified_base 18: mod_base = OTHER; note = 2'-O-methyl-adenosine-3'-phosphate
  modified_base 19: mod_base = OTHER; note = 2'-O-methyl-adenosine-3'-phosphate
taaatctgttctaagacaa

SEQ ID NO: 1753 - RNA, 19 nt, synthetic construct
  source 1..19: mol_type = other RNA
  modified_base 1: mod_base = OTHER; note = 2'-O-methyl-adenosine-3'-phosphorothioate
  modified_base 2: mod_base = OTHER; note = 2'-O-methyl-uridine-3'-phosphorothioate
  modified_base 3: mod_base = OTHER; note = 2'-O-methyl-cytidine-3'-phosphate
  modified_base 4: mod_base = OTHER; note = 2'-O-methyl-uridine-3'-phosphate
  modified_base 5: mod_base = OTHER; note = 2'-deoxy-2'-fluoro-guanosine-3'-phosphate
  modified_base 6: mod_base = OTHER; note = 2'-O-methyl-uridine-3'-phosphate
  modified_base 7: mod_base = OTHER; note = 2'-deoxy-2'-fluoro-uridine-3'-phosphate
  modified_base 8: mod_base = OTHER; note = 2'-deoxy-2'-fluoro-cytidine-3'-phosphate
  modified_base 9: mod_base = OTHER; note = 2'-deoxy-2'-fluoro-uridine-3'-phosphate
  modified_base 10: mod_base = OTHER; note = 2'-O-methyl-adenosine-3'-phosphate
  modified_base 11: mod_base = OTHER; note = 2'-O-methyl-adenosine-3'-phosphate
  modified_base 12: mod_base = OTHER; note = 2'-O-methyl-guanosine-3'-phosphate
  modified_base 13: mod_base = OTHER; note = 2'-O-methyl-adenosine-3'-phosphate
  modified_base 14: mod_base = OTHER; note = 2'-O-methyl-cytidine-3'-phosphate
  modified_base 15: mod_base = OTHER; note = 2'-O-methyl-adenosine-3'-phosphate
  modified_base 16: mod_base = OTHER; note = 2'-O-methyl-uridine-3'-phosphate
  modified_base 17: mod_base = OTHER; note = 2'-O-methyl-adenosine-3'-phosphate
  modified_base 18: mod_base = OTHER; note = 2'-O-methyl-uridine-3'-phosphate
  modified_base 19: mod_base = OTHER; note = 2'-O-methyl-adenosine-3'-phosphate
atctgttctaagacatata

SEQ ID NO: 1754 - RNA, 19 nt, synthetic construct
  source 1..19: mol_type = other RNA
  modified_base 1: mod_base = OTHER; note = 2'-O-methyl-cytidine-3'-phosphorothioate
  modified_base 2: mod_base = OTHER; note = 2'-O-methyl-uridine-3'-phosphorothioate
  modified_base 3: mod_base = OTHER; note = 2'-O-methyl-guanosine-3'-phosphate
  modified_base 4: mod_base = OTHER; note = 2'-O-methyl-uridine-3'-phosphate
  modified_base 5: mod_base = OTHER; note = 2'-deoxy-2'-fluoro-uridine-3'-phosphate
  modified_base 6: mod_base = OTHER; note = 2'-O-methyl-cytidine-3'-phosphate
  modified_base 7: mod_base = OTHER; note = 2'-deoxy-2'-fluoro-uridine-3'-phosphate
  modified_base 8: mod_base = OTHER; note = 2'-deoxy-2'-fluoro-adenosine-3'-phosphate
  modified_base 9: mod_base = OTHER; note = 2'-deoxy-2'-fluoro-adenosine-3'-phosphate
  modified_base 10: mod_base = OTHER; note = 2'-O-methyl-guanosine-3'-phosphate
  modified_base 11: mod_base = OTHER; note = 2'-O-methyl-adenosine-3'-phosphate
  modified_base 12: mod_base = OTHER; note = 2'-O-methyl-cytidine-3'-phosphate
  modified_base 13: mod_base = OTHER; note = 2'-O-methyl-adenosine-3'-phosphate
  modified_base 14: mod_base = OTHER; note = 2'-O-methyl-uridine-3'-phosphate
  modified_base 15: mod_base = OTHER; note = 2'-O-methyl-adenosine-3'-phosphate
  modified_base 16: mod_base = OTHER; note = 2'-O-methyl-uridine-3'-phosphate
  modified_base 17: mod_base = OTHER; note = 2'-O-methyl-guanosine-3'-phosphate
  modified_base 18: mod_base = OTHER; note = 2'-O-methyl-adenosine-3'-phosphate
  modified_base 19: mod_base = OTHER; note = 2'-O-methyl-adenosine-3'-phosphate
ctgttctaagacatatgaa

SEQ ID NO: 1755 - RNA, 19 nt, synthetic construct
  source 1..19: mol_type = other RNA
  modified_base 1: mod_base = OTHER; note = 2'-O-methyl-uridine-3'-phosphorothioate
  modified_base 2: mod_base = OTHER; note = 2'-O-methyl-guanosine-3'-phosphorothioate
  modified_base 3: mod_base = OTHER; note = 2'-O-methyl-uridine-3'-phosphate
  modified_base 4: mod_base = OTHER; note = 2'-O-methyl-uridine-3'-phosphate
  modified_base 5: mod_base = OTHER; note = 2'-deoxy-2'-fluoro-cytidine-3'-phosphate
  modified_base 6: mod_base = OTHER; note = 2'-O-methyl-uridine-3'-phosphate
  modified_base 7: mod_base = OTHER; note = 2'-deoxy-2'-fluoro-adenosine-3'-phosphate
  modified_base 8: mod_base = OTHER; note = 2'-deoxy-2'-fluoro-adenosine-3'-phosphate
  modified_base 9: mod_base = OTHER; note = 2'-deoxy-2'-fluoro-guanosine-3'-phosphate
  modified_base 10: mod_base = OTHER; note = 2'-O-methyl-adenosine-3'-phosphate
  modified_base 11: mod_base = OTHER; note = 2'-O-methyl-cytidine-3'-phosphate
  modified_base 12: mod_base = OTHER; note = 2'-O-methyl-adenosine-3'-phosphate
  modified_base 13: mod_base = OTHER; note = 2'-O-methyl-uridine-3'-phosphate
  modified_base 14: mod_base = OTHER; note = 2'-O-methyl-adenosine-3'-phosphate
  modified_base 15: mod_base = OTHER; note = 2'-O-methyl-uridine-3'-phosphate
  modified_base 16: mod_base = OTHER; note = 2'-O-methyl-guanosine-3'-phosphate
  modified_base 17: mod_base = OTHER; note = 2'-O-methyl-adenosine-3'-phosphate
  modified_base 18: mod_base = OTHER; note = 2'-O-methyl-uridine-3'-phosphate
  modified_base 19: mod_base = OTHER; note = 2'-O-methyl-adenosine-3'-phosphate
tgttctaagacatatgata

SEQ ID NO: 1756 - RNA, 19 nt, synthetic construct
  source 1..19: mol_type = other RNA
  modified_base 1: mod_base = OTHER; note = 2'-O-methyl-cytidine-3'-phosphorothioate
  modified_base 2: mod_base = OTHER; note = 2'-O-methyl-uridine-3'-phosphorothioate
  modified_base 3: mod_base = OTHER; note = 2'-O-methyl-adenosine-3'-phosphate
  modified_base 4: mod_base = OTHER; note = 2'-O-methyl-adenosine-3'-phosphate
  modified_base 5: mod_base = OTHER; note = 2'-deoxy-2'-fluoro-guanosine-3'-phosphate
  modified_base 6: mod_base = OTHER; note = 2'-O-methyl-adenosine-3'-phosphate
  modified_base 7: mod_base = OTHER; note = 2'-deoxy-2'-fluoro-cytidine-3'-phosphate
  modified_base 8: mod_base = OTHER; note = 2'-deoxy-2'-fluoro-adenosine-3'-phosphate
  modified_base 9: mod_base = OTHER; note = 2'-deoxy-2'-fluoro-uridine-3'-phosphate
  modified_base 10: mod_base = OTHER; note = 2'-O-methyl-adenosine-3'-phosphate
  modified_base 11: mod_base = OTHER; note = 2'-O-methyl-uridine-3'-phosphate
  modified_base 12: mod_base = OTHER; note = 2'-O-methyl-guanosine-3'-phosphate
  modified_base 13: mod_base = OTHER; note = 2'-O-methyl-adenosine-3'-phosphate
  modified_base 14: mod_base = OTHER; note = 2'-O-methyl-uridine-3'-phosphate
  modified_base 15: mod_base = OTHER; note = 2'-O-methyl-cytidine-3'-phosphate
  modified_base 16: mod_base = OTHER; note = 2'-O-methyl-adenosine-3'-phosphate
  modified_base 17: mod_base = OTHER; note = 2'-O-methyl-adenosine-3'-phosphate
  modified_base 18: mod_base = OTHER; note = 2'-O-methyl-cytidine-3'-phosphate
  modified_base 19: mod_base = OTHER; note = 2'-O-methyl-adenosine-3'-phosphate
ctaagacatatgatcaaca

SEQ ID NO: 1757 - RNA, 19 nt, synthetic construct
  source 1..19: mol_type = other RNA
  modified_base 1: mod_base = OTHER; note = 2'-O-methyl-uridine-3'-phosphorothioate
  modified_base 2: mod_base = OTHER; note = 2'-O-methyl-adenosine-3'-phosphorothioate
  modified_base 3: mod_base = OTHER; note = 2'-O-methyl-adenosine-3'-phosphate
  modified_base 4: mod_base = OTHER; note = 2'-O-methyl-guanosine-3'-phosphate
  modified_base 5: mod_base = OTHER; note = 2'-deoxy-2'-fluoro-adenosine-3'-phosphate
  modified_base 6: mod_base = OTHER; note = 2'-O-methyl-cytidine-3'-phosphate
  modified_base 7: mod_base = OTHER; note = 2'-deoxy-2'-fluoro-adenosine-3'-phosphate
  modified_base 8: mod_base = OTHER; note = 2'-deoxy-2'-fluoro-uridine-3'-phosphate
  modified_base 9: mod_base = OTHER; note = 2'-deoxy-2'-fluoro-adenosine-3'-phosphate
  modified_base 10: mod_base = OTHER; note = 2'-O-methyl-uridine-3'-phosphate
  modified_base 11: mod_base = OTHER; note = 2'-O-methyl-guanosine-3'-phosphate
  modified_base 12: mod_base = OTHER; note = 2'-O-methyl-adenosine-3'-phosphate
  modified_base 13: mod_base = OTHER; note = 2'-O-methyl-uridine-3'-phosphate
  modified_base 14: mod_base = OTHER; note = 2'-O-methyl-cytidine-3'-phosphate
  modified_base 15: mod_base = OTHER; note = 2'-O-methyl-adenosine-3'-phosphate
  modified_base 16: mod_base = OTHER; note = 2'-O-methyl-adenosine-3'-phosphate
  modified_base 17: mod_base = OTHER; note = 2'-O-methyl-cytidine-3'-phosphate
  modified_base 18: mod_base = OTHER; note = 2'-O-methyl-adenosine-3'-phosphate
  modified_base 19: mod_base = OTHER; note = 2'-O-methyl-adenosine-3'-phosphate
taagacatatgatcaacaa

SEQ ID NO: 1758 - RNA, 19 nt, synthetic construct
  source 1..19: mol_type = other RNA
  modified_base 1: mod_base = OTHER; note = 2'-O-methyl-cytidine-3'-phosphorothioate
  modified_base 2: mod_base = OTHER; note = 2'-O-methyl-adenosine-3'-phosphorothioate
  modified_base 3: mod_base = OTHER; note = 2'-O-methyl-uridine-3'-phosphate
  modified_base 4: mod_base = OTHER; note = 2'-O-methyl-adenosine-3'-phosphate
  modified_base 5: mod_base = OTHER; note = 2'-deoxy-2'-fluoro-uridine-3'-phosphate
  modified_base 6: mod_base = OTHER; note = 2'-O-methyl-guanosine-3'-phosphate
  modified_base 7: mod_base = OTHER; note = 2'-deoxy-2'-fluoro-adenosine-3'-phosphate
  modified_base 8: mod_base = OTHER; note = 2'-deoxy-2'-fluoro-uridine-3'-phosphate
  modified_base 9: mod_base = OTHER; note = 2'-deoxy-2'-fluoro-cytidine-3'-phosphate
  modified_base 10: mod_base = OTHER; note = 2'-O-methyl-adenosine-3'-phosphate
  modified_base 11: mod_base = OTHER; note = 2'-O-methyl-adenosine-3'-phosphate
  modified_base 12: mod_base = OTHER; note = 2'-O-methyl-cytidine-3'-phosphate
  modified_base 13: mod_base = OTHER; note = 2'-O-methyl-adenosine-3'-phosphate
  modified_base 14: mod_base = OTHER; note = 2'-O-methyl-guanosine-3'-phosphate
  modified_base 15: mod_base = OTHER; note = 2'-O-methyl-adenosine-3'-phosphate
  modified_base 16: mod_base = OTHER; note = 2'-O-methyl-uridine-3'-phosphate
  modified_base 17: mod_base = OTHER; note = 2'-O-methyl-guanosine-3'-phosphate
  modified_base 18: mod_base = OTHER; note = 2'-O-methyl-adenosine-3'-phosphate
  modified_base 19: mod_base = OTHER; note = 2'-O-methyl-adenosine-3'-phosphate
catatgatcaacagatgaa

SEQ ID NO: 1759 - RNA, 19 nt, synthetic construct
  source 1..19: mol_type = other RNA
  modified_base 1: mod_base = OTHER; note = 2'-O-methyl-adenosine-3'-phosphorothioate
  modified_base 2: mod_base = OTHER; note = 2'-O-methyl-uridine-3'-phosphorothioate
  modified_base 3: mod_base = OTHER; note = 2'-O-methyl-adenosine-3'-phosphate
  modified_base 4: mod_base = OTHER; note = 2'-O-methyl-uridine-3'-phosphate
  modified_base 5: mod_base = OTHER; note = 2'-deoxy-2'-fluoro-guanosine-3'-phosphate
  modified_base 6: mod_base = OTHER; note = 2'-O-methyl-adenosine-3'-phosphate
  modified_base 7: mod_base = OTHER; note = 2'-deoxy-2'-fluoro-uridine-3'-phosphate
  modified_base 8: mod_base = OTHER; note = 2'-deoxy-2'-fluoro-cytidine-3'-phosphate
  modified_base 9: mod_base = OTHER; note = 2'-deoxy-2'-fluoro-adenosine-3'-phosphate
  modified_base 10: mod_base = OTHER; note = 2'-O-methyl-adenosine-3'-phosphate
  modified_base 11: mod_base = OTHER; note = 2'-O-methyl-cytidine-3'-phosphate
  modified_base 12: mod_base = OTHER; note = 2'-O-methyl-adenosine-3'-phosphate
  modified_base 13: mod_base = OTHER; note = 2'-O-methyl-guanosine-3'-phosphate
  modified_base 14: mod_base = OTHER; note = 2'-O-methyl-adenosine-3'-phosphate
  modified_base 15: mod_base = OTHER; note = 2'-O-methyl-uridine-3'-phosphate
  modified_base 16: mod_base = OTHER; note = 2'-O-methyl-guanosine-3'-phosphate
  modified_base 17: mod_base = OTHER; note = 2'-O-methyl-adenosine-3'-phosphate
  modified_base 18: mod_base = OTHER; note = 2'-O-methyl-guanosine-3'-phosphate
  modified_base 19: mod_base = OTHER; note = 2'-O-methyl-adenosine-3'-phosphate
atatgatcaacagatgaga

SEQ ID NO: 1760 - RNA, 19 nt, synthetic construct
  source 1..19: mol_type = other RNA
  modified_base 1: mod_base = OTHER; note = 2'-O-methyl-uridine-3'-phosphorothioate
  modified_base 2: mod_base = OTHER; note = 2'-O-methyl-guanosine-3'-phosphorothioate
  modified_base 3: mod_base = OTHER; note = 2'-O-methyl-adenosine-3'-phosphate
  modified_base 4: mod_base = OTHER; note = 2'-O-methyl-uridine-3'-phosphate
  modified_base 5: mod_base = OTHER; note = 2'-deoxy-2'-fluoro-cytidine-3'-phosphate
  modified_base 6: mod_base = OTHER; note = 2'-O-methyl-adenosine-3'-phosphate
  modified_base 7: mod_base = OTHER; note = 2'-deoxy-2'-fluoro-adenosine-3'-phosphate
  modified_base 8: mod_base = OTHER; note = 2'-deoxy-2'-fluoro-cytidine-3'-phosphate
  modified_base 9: mod_base = OTHER; note = 2'-deoxy-2'-fluoro-adenosine-3'-phosphate
  modified_base 10: mod_base = OTHER; note = 2'-O-methyl-guanosine-3'-phosphate
  modified_base 11: mod_base = OTHER; note = 2'-O-methyl-adenosine-3'-phosphate
  modified_base 12: mod_base = OTHER; note = 2'-O-methyl-uridine-3'-phosphate
  modified_base 13: mod_base = OTHER; note = 2'-O-methyl-guanosine-3'-phosphate
  modified_base 14: mod_base = OTHER; note = 2'-O-methyl-adenosine-3'-phosphate
  modified_base 15: mod_base = OTHER; note = 2'-O-methyl-guanosine-3'-phosphate
  modified_base 16: mod_base = OTHER; note = 2'-O-methyl-adenosine-3'-phosphate
  modified_base 17: mod_base = OTHER; note = 2'-O-methyl-adenosine-3'-phosphate
  modified_base 18: mod_base = OTHER; note = 2'-O-methyl-cytidine-3'-phosphate
  modified_base 19: mod_base = OTHER; note = 2'-O-methyl-adenosine-3'-phosphate
tgatcaacagatgagaaca

SEQ ID NO: 1761 - RNA, 19 nt, synthetic construct
  source 1..19: mol_type = other RNA
  modified_base 1: mod_base = OTHER; note = 2'-O-methyl-adenosine-3'-phosphorothioate
  modified_base 2: mod_base = OTHER; note = 2'-O-methyl-uridine-3'-phosphorothioate
  modified_base 3: mod_base = OTHER; note = 2'-O-methyl-cytidine-3'-phosphate
  modified_base 4: mod_base = OTHER; note = 2'-O-methyl-adenosine-3'-phosphate
  modified_base 5: mod_base = OTHER; note = 2'-deoxy-2'-fluoro-adenosine-3'-phosphate
  modified_base 6: mod_base = OTHER; note = 2'-O-methyl-cytidine-3'-phosphate
  modified_base 7: mod_base = OTHER; note = 2'-deoxy-2'-fluoro-adenosine-3'-phosphate
  modified_base 8: mod_base = OTHER; note = 2'-deoxy-2'-fluoro-guanosine-3'-phosphate
  modified_base 9: mod_base = OTHER; note = 2'-deoxy-2'-fluoro-adenosine-3'-phosphate
  modified_base 10: mod_base = OTHER; note = 2'-O-methyl-uridine-3'-phosphate
  modified_base 11: mod_base = OTHER; note = 2'-O-methyl-guanosine-3'-phosphate
  modified_base 12: mod_base = OTHER; note = 2'-O-methyl-adenosine-3'-phosphate
  modified_base 13: mod_base = OTHER; note = 2'-O-methyl-guanosine-3'-phosphate
  modified_base 14: mod_base = OTHER; note = 2'-O-methyl-adenosine-3'-phosphate
  modified_base 15: mod_base = OTHER; note = 2'-O-methyl-adenosine-3'-phosphate
  modified_base 16: mod_base = OTHER; note = 2'-O-methyl-cytidine-3'-phosphate
  modified_base 17: mod_base = OTHER; note = 2'-O-methyl-uridine-3'-phosphate
  modified_base 18: mod_base = OTHER; note = 2'-O-methyl-guanosine-3'-phosphate
  modified_base 19: mod_base = OTHER; note = 2'-O-methyl-adenosine-3'-phosphate
atcaacagatgagaactga

SEQ ID NO: 1762 - RNA, 19 nt, synthetic construct
  source 1..19: mol_type = other RNA
  modified_base 1: mod_base = OTHER; note = 2'-O-methyl-uridine-3'-phosphorothioate
  modified_base 2: mod_base = OTHER; note = 2'-O-methyl-cytidine-3'-phosphorothioate
  modified_base 3: mod_base = OTHER; note = 2'-O-methyl-adenosine-3'-phosphate
  modified_base 4: mod_base = OTHER; note = 2'-O-methyl-adenosine-3'-phosphate
  modified_base 5: mod_base = OTHER; note = 2'-deoxy-2'-fluoro-cytidine-3'-phosphate
  modified_base 6: mod_base = OTHER; note = 2'-O-methyl-adenosine-3'-phosphate
  modified_base 7: mod_base = OTHER; note = 2'-deoxy-2'-fluoro-guanosine-3'-phosphate
  modified_base 8: mod_base = OTHER; note = 2'-deoxy-2'-fluoro-adenosine-3'-phosphate
  modified_base 9: mod_base = OTHER; note = 2'-deoxy-2'-fluoro-uridine-3'-phosphate
  modified_base 10: mod_base = OTHER; note = 2'-O-methyl-guanosine-3'-phosphate
  modified_base 11: mod_base = OTHER; note = 2'-O-methyl-adenosine-3'-phosphate
  modified_base 12: mod_base = OTHER; note = 2'-O-methyl-guanosine-3'-phosphate
  modified_base 13: mod_base = OTHER; note = 2'-O-methyl-adenosine-3'-phosphate
  modified_base 14: mod_base = OTHER; note = 2'-O-methyl-adenosine-3'-phosphate
  modified_base 15: mod_base = OTHER; note = 2'-O-methyl-cytidine-3'-phosphate
  modified_base 16: mod_base = OTHER; note = 2'-O-methyl-uridine-3'-phosphate
  modified_base 17: mod_base = OTHER; note = 2'-O-methyl-guanosine-3'-phosphate
  modified_base 18: mod_base = OTHER; note = 2'-O-methyl-guanosine-3'-phosphate
  modified_base 19: mod_base = OTHER; note = 2'-O-methyl-adenosine-3'-phosphate
tcaacagatgagaactgga

SEQ ID NO: 1763 - RNA, 19 nt, synthetic construct
  source 1..19: mol_type = other RNA
  modified_base 1: mod_base = OTHER; note = 2'-O-methyl-adenosine-3'-phosphorothioate
  modified_base 2: mod_base = OTHER; note = 2'-O-methyl-guanosine-3'-phosphorothioate
  modified_base 3: mod_base = OTHER; note = 2'-O-methyl-uridine-3'-phosphate
  modified_base 4: mod_base = OTHER; note = 2'-O-methyl-guanosine-3'-phosphate
  modified_base 5: mod_base = OTHER; note = 2'-deoxy-2'-fluoro-adenosine-3'-phosphate
  modified_base 6: mod_base = OTHER; note = 2'-O-methyl-guanosine-3'-phosphate
  modified_base 7: mod_base = OTHER; note = 2'-deoxy-2'-fluoro-adenosine-3'-phosphate
  modified_base 8: mod_base = OTHER; note = 2'-deoxy-2'-fluoro-uridine-3'-phosphate
  modified_base 9: mod_base = OTHER; note = 2'-deoxy-2'-fluoro-uridine-3'-phosphate
  modified_base 10: mod_base = OTHER; note = 2'-O-methyl-adenosine-3'-phosphate
  modified_base 11: mod_base = OTHER; note = 2'-O-methyl-guanosine-3'-phosphate
  modified_base 12: mod_base = OTHER; note = 2'-O-methyl-uridine-3'-phosphate
  modified_base 13: mod_base = OTHER; note = 2'-O-methyl-cytidine-3'-phosphate
  modified_base 14: mod_base = OTHER; note = 2'-O-methyl-adenosine-3'-phosphate
  modified_base 15: mod_base = OTHER; note = 2'-O-methyl-uridine-3'-phosphate
  modified_base 16: mod_base = OTHER; note = 2'-O-methyl-adenosine-3'-phosphate
  modified_base 17: mod_base = OTHER; note = 2'-O-methyl-uridine-3'-phosphate
  modified_base 18: mod_base = OTHER; note = 2'-O-methyl-cytidine-3'-phosphate
  modified_base 19: mod_base = OTHER; note = 2'-O-methyl-adenosine-3'-phosphate
agtgagattagtcatatca

SEQ ID NO: 1764 - RNA, 19 nt, synthetic construct
  source 1..19: mol_type = other RNA
  modified_base 1: mod_base = OTHER; note = 2'-O-methyl-uridine-3'-phosphorothioate
  modified_base 2: mod_base = OTHER; note = 2'-O-methyl-guanosine-3'-phosphorothioate
  modified_base 3: mod_base = OTHER; note = 2'-O-methyl-adenosine-3'-phosphate
  modified_base 4: mod_base = OTHER; note = 2'-O-methyl-guanosine-3'-phosphate
  modified_base 5: mod_base = OTHER; note = 2'-deoxy-2'-fluoro-adenosine-3'-phosphate
  modified_base 6: mod_base = OTHER; note = 2'-O-methyl-uridine-3'-phosphate
  modified_base 7: mod_base = OTHER; note = 2'-deoxy-2'-fluoro-uridine-3'-phosphate
  modified_base 8: mod_base = OTHER; note = 2'-deoxy-2'-fluoro-adenosine-3'-phosphate
  modified_base 9: mod_base = OTHER; note = 2'-deoxy-2'-fluoro-guanosine-3'-phosphate
  modified_base 10: mod_base = OTHER; note = 2'-O-methyl-uridine-3'-phosphate
  modified_base 11: mod_base = OTHER; note = 2'-O-methyl-cytidine-3'-phosphate
  modified_base 12: mod_base = OTHER; note = 2'-O-methyl-adenosine-3'-phosphate
  modified_base 13: mod_base = OTHER; note = 2'-O-methyl-uridine-3'-phosphate
  modified_base 14: mod_base = OTHER; note = 2'-O-methyl-adenosine-3'-phosphate
  modified_base 15: mod_base = OTHER; note = 2'-O-methyl-uridine-3'-phosphate
  modified_base 16: mod_base = OTHER; note = 2'-O-methyl-cytidine-3'-phosphate
  modified_base 17: mod_base = OTHER; note = 2'-O-methyl-adenosine-3'-phosphate
  modified_base 18: mod_base = OTHER; note = 2'-O-methyl-cytidine-3'-phosphate
  modified_base 19: mod_base = OTHER; note = 2'-O-methyl-adenosine-3'-phosphate
tgagattagtcatatcaca

SEQ ID NO: 1765 - RNA, 19 nt, synthetic construct
  source 1..19: mol_type = other RNA
  modified_base 1: mod_base = OTHER; note = 2'-O-methyl-uridine-3'-phosphorothioate
  modified_base 2: mod_base = OTHER; note = 2'-O-methyl-cytidine-3'-phosphorothioate
  modified_base 3: mod_base = OTHER; note = 2'-O-methyl-adenosine-3'-phosphate
  modified_base 4: mod_base = OTHER; note = 2'-O-methyl-cytidine-3'-phosphate
  modified_base 5: mod_base = OTHER; note = 2'-deoxy-2'-fluoro-uridine-3'-phosphate
  modified_base 6: mod_base = OTHER; note = 2'-O-methyl-adenosine-3'-phosphate
  modified_base 7: mod_base = OTHER; note = 2'-deoxy-2'-fluoro-adenosine-3'-phosphate
  modified_base 8: mod_base = OTHER; note = 2'-deoxy-2'-fluoro-uridine-3'-phosphate
  modified_base 9: mod_base = OTHER; note = 2'-deoxy-2'-fluoro-adenosine-3'-phosphate
  modified_base 10: mod_base = OTHER; note = 2'-O-methyl-uridine-3'-phosphate
  modified_base 11: mod_base = OTHER; note = 2'-O-methyl-adenosine-3'-phosphate
  modified_base 12: mod_base = OTHER; note = 2'-O-methyl-cytidine-3'-phosphate
  modified_base 13: mod_base = OTHER; note = 2'-O-methyl-uridine-3'-phosphate
  modified_base 14: mod_base = OTHER; note = 2'-O-methyl-adenosine-3'-phosphate
  modified_base 15: mod_base = OTHER; note = 2'-O-methyl-adenosine-3'-phosphate
  modified_base 16: mod_base = OTHER; note = 2'-O-methyl-cytidine-3'-phosphate
  modified_base 17: mod_base = OTHER; note = 2'-O-methyl-adenosine-3'-phosphate
  modified_base 18: mod_base = OTHER; note = 2'-O-methyl-adenosine-3'-phosphate
  modified_base 19: mod_base = OTHER; note = 2'-O-methyl-adenosine-3'-phosphate
tcactaatatactaacaaa

SEQ ID NO: 1766 - RNA, 19 nt, synthetic construct
  source 1..19: mol_type = other RNA
  modified_base 1: mod_base = OTHER; note = 2'-O-methyl-adenosine-3'-phosphorothioate
  modified_base 2: mod_base = OTHER; note = 2'-O-methyl-cytidine-3'-phosphorothioate
  modified_base 3: mod_base = OTHER; note = 2'-O-methyl-uridine-3'-phosphate
  modified_base 4: mod_base = OTHER; note = 2'-O-methyl-guanosine-3'-phosphate
  modified_base 5: mod_base = OTHER; note = 2'-deoxy-2'-fluoro-uridine-3'-phosphate
  modified_base 6: mod_base = OTHER; note = 2'-O-methyl-adenosine-3'-phosphate
  modified_base 7: mod_base = OTHER; note = 2'-deoxy-2'-fluoro-guanosine-3'-phosphate
  modified_base 8: mod_base = OTHER; note = 2'-deoxy-2'-fluoro-uridine-3'-phosphate
  modified_base 9: mod_base = OTHER; note = 2'-deoxy-2'-fluoro-guanosine-3'-phosphate
  modified_base 10: mod_base = OTHER; note = 2'-O-methyl-adenosine-3'-phosphate
  modified_base 11: mod_base = OTHER; note = 2'-O-methyl-adenosine-3'-phosphate
  modified_base 12: mod_base = OTHER; note = 2'-O-methyl-uridine-3'-phosphate
  modified_base 13: mod_base = OTHER; note = 2'-O-methyl-uridine-3'-phosphate
  modified_base 14: mod_base = OTHER; note = 2'-O-methyl-adenosine-3'-phosphate
  modified_base 15: mod_base = OTHER; note = 2'-O-methyl-uridine-3'-phosphate
  modified_base 16: mod_base = OTHER; note = 2'-O-methyl-cytidine-3'-phosphate
  modified_base 17: mod_base = OTHER; note = 2'-O-methyl-uridine-3'-phosphate
  modified_base 18: mod_base = OTHER; note = 2'-O-methyl-guanosine-3'-phosphate
  modified_base 19: mod_base = OTHER; note = 2'-O-methyl-adenosine-3'-phosphate
actgtagtgaattatctga

SEQ ID NO: 1767 - RNA, 19 nt, synthetic construct
  source 1..19: mol_type = other RNA
  modified_base 1: mod_base = OTHER; note = 2'-O-methyl-cytidine-3'-phosphorothioate
  modified_base 2: mod_base = OTHER; note = 2'-O-methyl-uridine-3'-phosphorothioate
  modified_base 3: mod_base = OTHER; note = 2'-O-methyl-guanosine-3'-phosphate
  modified_base 4: mod_base = OTHER; note = 2'-O-methyl-uridine-3'-phosphate
  modified_base 5: mod_base = OTHER; note = 2'-deoxy-2'-fluoro-adenosine-3'-phosphate
  modified_base 6: mod_base = OTHER; note = 2'-O-methyl-guanosine-3'-phosphate
  modified_base 7: mod_base = OTHER; note = 2'-deoxy-2'-fluoro-uridine-3'-phosphate
  modified_base 8: mod_base = OTHER; note = 2'-deoxy-2'-fluoro-guanosine-3'-phosphate
  modified_base 9: mod_base = OTHER; note = 2'-deoxy-2'-fluoro-adenosine-3'-phosphate
  modified_base 10: mod_base = OTHER; note = 2'-O-methyl-adenosine-3'-phosphate
  modified_base 11: mod_base = OTHER; note = 2'-O-methyl-uridine-3'-phosphate
  modified_base 12: mod_base = OTHER; note = 2'-O-methyl-uridine-3'-phosphate
  modified_base 13: mod_base = OTHER; note = 2'-O-methyl-adenosine-3'-phosphate
  modified_base 14: mod_base = OTHER; note = 2'-O-methyl-uridine-3'-phosphate
  modified_base 15: mod_base = OTHER; note = 2'-O-methyl-cytidine-3'-phosphate
  modified_base 16: mod_base = OTHER; note = 2'-O-methyl-uridine-3'-phosphate
  modified_base 17: mod_base = OTHER; note = 2'-O-methyl-guanosine-3'-phosphate
  modified_base 18: mod_base = OTHER; note = 2'-O-methyl-adenosine-3'-phosphate
  modified_base 19: mod_base = OTHER; note = 2'-O-methyl-adenosine-3'-phosphate
ctgtagtgaattatctgaa

SEQ ID NO: 1768 - RNA, 19 nt, synthetic construct
  source 1..19: mol_type = other RNA
  modified_base 1: mod_base = OTHER; note = 2'-O-methyl-guanosine-3'-phosphorothioate
  modified_base 2: mod_base = OTHER; note = 2'-O-methyl-guanosine-3'-phosphorothioate
  modified_base 3: mod_base = OTHER; note = 2'-O-methyl-adenosine-3'-phosphate
  modified_base 4: mod_base = OTHER; note = 2'-O-methyl-adenosine-3'-phosphate
  modified_base 5: mod_base = OTHER; note = 2'-deoxy-2'-fluoro-uridine-3'-phosphate
  modified_base 6: mod_base = OTHER; note = 2'-O-methyl-cytidine-3'-phosphate
  modified_base 7: mod_base = OTHER; note = 2'-deoxy-2'-fluoro-adenosine-3'-phosphate
  modified_base 8: mod_base = OTHER; note = 2'-deoxy-2'-fluoro-uridine-3'-phosphate
  modified_base 9: mod_base = OTHER; note = 2'-deoxy-2'-fluoro-guanosine-3'-phosphate
  modified_base 10: mod_base = OTHER; note = 2'-O-methyl-adenosine-3'-phosphate
  modified_base 11: mod_base = OTHER; note = 2'-O-methyl-adenosine-3'-phosphate
  modified_base 12: mod_base = OTHER; note = 2'-O-methyl-adenosine-3'-phosphate
  modified_base 13: mod_base = OTHER; note = 2'-O-methyl-cytidine-3'-phosphate
  modified_base 14: mod_base = OTHER; note = 2'-O-methyl-cytidine-3'-phosphate
  modified_base 15: mod_base = OTHER; note = 2'-O-methyl-uridine-3'-phosphate
  modified_base 16: mod_base = OTHER; note = 2'-O-methyl-uridine-3'-phosphate
  modified_base 17: mod_base = OTHER; note = 2'-O-methyl-adenosine-3'-phosphate
  modified_base 18: mod_base = OTHER; note = 2'-O-methyl-adenosine-3'-phosphate
  modified_base 19: mod_base = OTHER; note = 2'-O-methyl-adenosine-3'-phosphate
ggaatcatgaaaccttaaa

SEQ ID NO: 1769 - RNA, 19 nt, synthetic construct
  source 1..19: mol_type = other RNA
  modified_base 1: mod_base = OTHER; note = 2'-O-methyl-guanosine-3'-phosphorothioate
  modified_base 2: mod_base = OTHER; note = 2'-O-methyl-adenosine-3'-phosphorothioate
  modified_base 3: mod_base = OTHER; note = 2'-O-methyl-adenosine-3'-phosphate
  modified_base 4: mod_base = OTHER; note = 2'-O-methyl-uridine-3'-phosphate
  modified_base 5: mod_base = OTHER; note = 2'-deoxy-2'-fluoro-cytidine-3'-phosphate
  modified_base 6: mod_base = OTHER; note = 2'-O-methyl-adenosine-3'-phosphate
  modified_base 7: mod_base = OTHER; note = 2'-deoxy-2'-fluoro-uridine-3'-phosphate
  modified_base 8: mod_base = OTHER; note = 2'-deoxy-2'-fluoro-guanosine-3'-phosphate
  modified_base 9: mod_base = OTHER; note = 2'-deoxy-2'-fluoro-adenosine-3'-phosphate
  modified_base 10: mod_base = OTHER; note = 2'-O-methyl-adenosine-3'-phosphate
  modified_base 11: mod_base = OTHER; note = 2'-O-methyl-adenosine-3'-phosphate
  modified_base 12: mod_base = OTHER; note = 2'-O-methyl-cytidine-3'-phosphate
  modified_base 13: mod_base = OTHER; note = 2'-O-methyl-cytidine-3'-phosphate
  modified_base 14: mod_base = OTHER; note = 2'-O-methyl-uridine-3'-phosphate
  modified_base 15: mod_base = OTHER; note = 2'-O-methyl-uridine-3'-phosphate
  modified_base 16: mod_base = OTHER; note = 2'-O-methyl-adenosine-3'-phosphate
  modified_base 17: mod_base = OTHER; note = 2'-O-methyl-adenosine-3'-phosphate
  modified_base 18: mod_base = OTHER; note = 2'-O-methyl-guanosine-3'-phosphate
  modified_base 19: mod_base = OTHER; note = 2'-O-methyl-adenosine-3'-phosphate
gaatcatgaaaccttaaga

SEQ ID NO: 1770 - RNA, 19 nt, synthetic construct
  source 1..19: mol_type = other RNA
  modified_base 1: mod_base = OTHER; note = 2'-O-methyl-adenosine-3'-phosphorothioate
  modified_base 2: mod_base = OTHER; note = 2'-O-methyl-adenosine-3'-phosphorothioate
  modified_base 3: mod_base = OTHER; note = 2'-O-methyl-uridine-3'-phosphate
  modified_base 4: mod_base = OTHER; note = 2'-O-methyl-cytidine-3'-phosphate
  modified_base 5: mod_base = OTHER; note = 2'-deoxy-2'-fluoro-adenosine-3'-phosphate
  modified_base 6: mod_base = OTHER; note = 2'-O-methyl-uridine-3'-phosphate
  modified_base 7: mod_base = OTHER; note = 2'-deoxy-2'-fluoro-guanosine-3'-phosphate
  modified_base 8: mod_base = OTHER; note = 2'-deoxy-2'-fluoro-adenosine-3'-phosphate
  modified_base 9: mod_base = OTHER; note = 2'-deoxy-2'-fluoro-adenosine-3'-phosphate
  modified_base 10: mod_base = OTHER; note = 2'-O-methyl-adenosine-3'-phosphate
  modified_base 11: mod_base = OTHER; note = 2'-O-methyl-cytidine-3'-phosphate
  modified_base 12: mod_base = OTHER; note = 2'-O-methyl-cytidine-3'-phosphate
  modified_base 13: mod_base = OTHER; note = 2'-O-methyl-uridine-3'-phosphate
  modified_base 14: mod_base = OTHER; note = 2'-O-methyl-uridine-3'-phosphate
  modified_base 15: mod_base = OTHER; note = 2'-O-methyl-adenosine-3'-phosphate
  modified_base 16: mod_base = OTHER; note = 2'-O-methyl-adenosine-3'-phosphate
  modified_base 17: mod_base = OTHER; note = 2'-O-methyl-guanosine-3'-phosphate
  modified_base 18: mod_base = OTHER; note = 2'-O-methyl-adenosine-3'-phosphate
  modified_base 19: mod_base = OTHER; note = 2'-O-methyl-adenosine-3'-phosphate
aatcatgaaaccttaagaa

SEQ ID NO: 1771 - RNA, 19 nt, synthetic construct
  source 1..19: mol_type = other RNA
  modified_base 1: mod_base = OTHER; note = 2'-O-methyl-adenosine-3'-phosphorothioate
  modified_base 2: mod_base = OTHER; note = 2'-O-methyl-uridine-3'-phosphorothioate
  modified_base 3: mod_base = OTHER; note = 2'-O-methyl-cytidine-3'-phosphate
  modified_base 4: mod_base = OTHER; note = 2'-O-methyl-adenosine-3'-phosphate
  modified_base 5: mod_base = OTHER; note = 2'-deoxy-2'-fluoro-uridine-3'-phosphate
  modified_base 6: mod_base = OTHER; note = 2'-O-methyl-guanosine-3'-phosphate
  modified_base 7: mod_base = OTHER; note = 2'-deoxy-2'-fluoro-adenosine-3'-phosphate
  modified_base 8: mod_base = OTHER; note = 2'-deoxy-2'-fluoro-adenosine-3'-phosphate
  modified_base 9: mod_base = OTHER; note = 2'-deoxy-2'-fluoro-adenosine-3'-phosphate
  modified_base 10: mod_base = OTHER; note = 2'-O-methyl-cytidine-3'-phosphate
  modified_base 11: mod_base = OTHER; note = 2'-O-methyl-cytidine-3'-phosphate
  modified_base 12: mod_base = OTHER; note = 2'-O-methyl-uridine-3'-phosphate
  modified_base 13: mod_base = OTHER; note = 2'-O-methyl-uridine-3'-phosphate
  modified_base 14: mod_base = OTHER; note = 2'-O-methyl-adenosine-3'-phosphate
  modified_base 15: mod_base = OTHER; note = 2'-O-methyl-adenosine-3'-phosphate
  modified_base 16: mod_base = OTHER; note = 2'-O-methyl-guanosine-3'-phosphate
  modified_base 17: mod_base = OTHER; note = 2'-O-methyl-adenosine-3'-phosphate
  modified_base 18: mod_base = OTHER; note = 2'-O-methyl-cytidine-3'-phosphate
  modified_base 19: mod_base = OTHER; note = 2'-O-methyl-adenosine-3'-phosphate
atcatgaaaccttaagaca

SEQ ID NO: 1772 - RNA, 19 nt, synthetic construct
  source 1..19: mol_type = other RNA
  modified_base 1: mod_base = OTHER; note = 2'-O-methyl-uridine-3'-phosphorothioate
  modified_base 2: mod_base = OTHER; note = 2'-O-methyl-cytidine-3'-phosphorothioate
  modified_base 3: mod_base = OTHER; note = 2'-O-methyl-adenosine-3'-phosphate
  modified_base 4: mod_base = OTHER; note = 2'-O-methyl-uridine-3'-phosphate
  modified_base 5: mod_base = OTHER; note = 2'-deoxy-2'-fluoro-guanosine-3'-phosphate
  modified_base 6: mod_base = OTHER; note = 2'-O-methyl-adenosine-3'-phosphate
  modified_base 7: mod_base = OTHER; note = 2'-deoxy-2'-fluoro-adenosine-3'-phosphate
  modified_base 8: mod_base = OTHER; note = 2'-deoxy-2'-fluoro-adenosine-3'-phosphate
  modified_base 9: mod_base = OTHER; note = 2'-deoxy-2'-fluoro-cytidine-3'-phosphate
  modified_base 10: mod_base = OTHER; note = 2'-O-methyl-cytidine-3'-phosphate
  modified_base 11: mod_base = OTHER; note = 2'-O-methyl-uridine-3'-phosphate
  modified_base 12: mod_base = OTHER; note = 2'-O-methyl-uridine-3'-phosphate
  modified_base 13: mod_base = OTHER; note = 2'-O-methyl-adenosine-3'-phosphate
  modified_base 14: mod_base = OTHER; note = 2'-O-methyl-adenosine-3'-phosphate
  modified_base 15: mod_base = OTHER; note = 2'-O-methyl-guanosine-3'-phosphate
  modified_base 16: mod_base = OTHER; note = 2'-O-methyl-adenosine-3'-phosphate
  modified_base 17: mod_base = OTHER; note = 2'-O-methyl-cytidine-3'-phosphate
  modified_base 18: mod_base = OTHER; note = 2'-O-methyl-uridine-3'-phosphate
  modified_base 19: mod_base = OTHER; note = 2'-O-methyl-adenosine-3'-phosphate
tcatgaaaccttaagacta

SEQ ID NO: 1773 - RNA, 19 nt, synthetic construct
  source 1..19: mol_type = other RNA
  modified_base 1: mod_base = OTHER; note = 2'-O-methyl-cytidine-3'-phosphorothioate
  modified_base 2: mod_base = OTHER; note = 2'-O-methyl-adenosine-3'-phosphorothioate
  modified_base 3: mod_base = OTHER; note = 2'-O-methyl-uridine-3'-phosphate
  modified_base 4: mod_base = OTHER; note = 2'-O-methyl-guanosine-3'-phosphate
  modified_base 5: mod_base = OTHER; note = 2'-deoxy-2'-fluoro-adenosine-3'-phosphate
  modified_base 6: mod_base = OTHER; note = 2'-O-methyl-adenosine-3'-phosphate
  modified_base 7: mod_base = OTHER; note = 2'-deoxy-2'-fluoro-adenosine-3'-phosphate
  modified_base 8: mod_base = OTHER; note = 2'-deoxy-2'-fluoro-cytidine-3'-phosphate
  modified_base 9: mod_base = OTHER; note = 2'-deoxy-2'-fluoro-cytidine-3'-phosphate
  modified_base 10: mod_base = OTHER; note = 2'-O-methyl-uridine-3'-phosphate
  modified_base 11: mod_base = OTHER; note = 2'-O-methyl-uridine-3'-phosphate
  modified_base 12: mod_base = OTHER; note = 2'-O-methyl-adenosine-3'-phosphate
  modified_base 13: mod_base = OTHER; note = 2'-O-methyl-adenosine-3'-phosphate
  modified_base 14: mod_base = OTHER; note = 2'-O-methyl-guanosine-3'-phosphate
  modified_base 15: mod_base = OTHER; note = 2'-O-methyl-adenosine-3'-phosphate
  modified_base 16: mod_base = OTHER; note = 2'-O-methyl-cytidine-3'-phosphate
  modified_base 17: mod_base = OTHER; note = 2'-O-methyl-uridine-3'-phosphate
  modified_base 18: mod_base = OTHER; note = 2'-O-methyl-uridine-3'-phosphate
  modified_base 19: mod_base = OTHER; note = 2'-O-methyl-adenosine-3'-phosphate
catgaaaccttaagactta

SEQ ID NO: 1774 - RNA, 19 nt, synthetic construct
  source 1..19: mol_type = other RNA
  modified_base 1: mod_base = OTHER; note = 2'-O-methyl-guanosine-3'-phosphorothioate
  modified_base 2: mod_base = OTHER; note = 2'-O-methyl-adenosine-3'-phosphorothioate
  modified_base 3: mod_base = OTHER; note = 2'-O-methyl-adenosine-3'-phosphate
  modified_base 4: mod_base = OTHER; note = 2'-O-methyl-adenosine-3'-phosphate
  modified_base 5: mod_base = OTHER; note = 2'-deoxy-2'-fluoro-cytidine-3'-phosphate
  modified_base 6: mod_base = OTHER; note = 2'-O-methyl-cytidine-3'-phosphate
  modified_base 7: mod_base = OTHER; note = 2'-deoxy-2'-fluoro-uridine-3'-phosphate
  modified_base 8: mod_base = OTHER; note = 2'-deoxy-2'-fluoro-uridine-3'-phosphate
  modified_base 9: mod_base = OTHER; note = 2'-deoxy-2'-fluoro-adenosine-3'-phosphate
  modified_base 10: mod_base = OTHER; note = 2'-O-methyl-adenosine-3'-phosphate
  modified_base 11: mod_base = OTHER; note = 2'-O-methyl-guanosine-3'-phosphate
  modified_base 12: mod_base = OTHER; note = 2'-O-methyl-adenosine-3'-phosphate
  modified_base 13: mod_base = OTHER; note = 2'-O-methyl-cytidine-3'-phosphate
  modified_base 14: mod_base = OTHER; note = 2'-O-methyl-uridine-3'-phosphate
  modified_base 15: mod_base = OTHER; note = 2'-O-methyl-uridine-3'-phosphate
  modified_base 16: mod_base = OTHER; note = 2'-O-methyl-cytidine-3'-phosphate
  modified_base 17: mod_base = OTHER; note = 2'-O-methyl-adenosine-3'-phosphate
  modified_base 18: mod_base = OTHER; note = 2'-O-methyl-guanosine-3'-phosphate
  modified_base 19: mod_base = OTHER; note = 2'-O-methyl-adenosine-3'-phosphate
gaaaccttaagacttcaga

SEQ ID NO: 1775 - RNA, 19 nt, synthetic construct
  source 1..19: mol_type = other RNA
  modified_base 1: mod_base = OTHER; note = 2'-O-methyl-adenosine-3'-phosphorothioate
  modified_base 2: mod_base = OTHER; note = 2'-O-methyl-adenosine-3'-phosphorothioate
  modified_base 3: mod_base = OTHER; note = 2'-O-methyl-adenosine-3'-phosphate
  modified_base 4: mod_base = OTHER; note = 2'-O-methyl-cytidine-3'-phosphate
  modified_base 5: mod_base = OTHER; note = 2'-deoxy-2'-fluoro-cytidine-3'-phosphate
  modified_base 6: mod_base = OTHER; note = 2'-O-methyl-uridine-3'-phosphate
  modified_base 7: mod_base = OTHER; note = 2'-deoxy-2'-fluoro-uridine-3'-phosphate
  modified_base 8: mod_base = OTHER; note = 2'-deoxy-2'-fluoro-adenosine-3'-phosphate
  modified_base 9: mod_base = OTHER; note = 2'-deoxy-2'-fluoro-adenosine-3'-phosphate
  modified_base 10: mod_base = OTHER; note = 2'-O-methyl-guanosine-3'-phosphate
  modified_base 11: mod_base = OTHER; note = 2'-O-methyl-adenosine-3'-phosphate
  modified_base 12: mod_base = OTHER; note = 2'-O-methyl-cytidine-3'-phosphate
  modified_base 13: mod_base = OTHER; note = 2'-O-methyl-uridine-3'-phosphate
  modified_base 14: mod_base = OTHER; note = 2'-O-methyl-uridine-3'-phosphate
  modified_base 15: mod_base = OTHER; note = 2'-O-methyl-cytidine-3'-phosphate
  modified_base 16: mod_base = OTHER; note = 2'-O-methyl-adenosine-3'-phosphate
  modified_base 17: mod_base = OTHER; note = 2'-O-methyl-guanosine-3'-phosphate
  modified_base 18: mod_base = OTHER; note = 2'-O-methyl-adenosine-3'-phosphate
  modified_base 19: mod_base = OTHER; note = 2'-O-methyl-adenosine-3'-phosphate
aaaccttaagacttcagaa

SEQ ID NO: 1776 - RNA, 19 nt, synthetic construct
  source 1..19: mol_type = other RNA
  modified_base 1: mod_base = OTHER; note = 2'-O-methyl-guanosine-3'-phosphorothioate
  modified_base 2: mod_base = OTHER; note = 2'-O-methyl-cytidine-3'-phosphorothioate
  modified_base 3: mod_base = OTHER; note = 2'-O-methyl-adenosine-3'-phosphate
  modified_base 4: mod_base = OTHER; note = 2'-O-methyl-guanosine-3'-phosphate
  modified_base 5: mod_base = OTHER; note = 2'-deoxy-2'-fluoro-guanosine-3'-phosphate
  modified_base 6: mod_base = OTHER; note = 2'-O-methyl-uridine-3'-phosphate
  modified_base 7: mod_base = OTHER; note = 2'-deoxy-2'-fluoro-uridine-3'-phosphate
  modified_base 8: mod_base = OTHER; note = 2'-deoxy-2'-fluoro-guanosine-3'-phosphate
  modified_base 9: mod_base = OTHER; note = 2'-deoxy-2'-fluoro-uridine-3'-phosphate
  modified_base 10: mod_base = OTHER; note = 2'-O-methyl-cytidine-3'-phosphate
  modified_base 11: mod_base = OTHER; note = 2'-O-methyl-uridine-3'-phosphate
  modified_base 12: mod_base = OTHER; note = 2'-O-methyl-uridine-3'-phosphate
  modified_base 13: mod_base = OTHER; note = 2'-O-methyl-cytidine-3'-phosphate
  modified_base 14: mod_base = OTHER; note = 2'-O-methyl-cytidine-3'-phosphate
  modified_base 15: mod_base = OTHER; note = 2'-O-methyl-adenosine-3'-phosphate
  modified_base 16: mod_base = OTHER; note = 2'-O-methyl-uridine-3'-phosphate
  modified_base 17: mod_base = OTHER; note = 2'-O-methyl-uridine-3'-phosphate
  modified_base 18: mod_base = OTHER; note = 2'-O-methyl-cytidine-3'-phosphate
  modified_base 19: mod_base = OTHER; note = 2'-O-methyl-adenosine-3'-phosphate
gcaggttgtcttccattca

SEQ ID NO: 1777 - RNA, 19 nt, synthetic construct
  source 1..19: mol_type = other RNA
  modified_base 1: mod_base = OTHER; note = 2'-O-methyl-cytidine-3'-phosphorothioate
  modified_base 2: mod_base = OTHER; note = 2'-O-methyl-adenosine-3'-phosphorothioate
  modified_base 3: mod_base = OTHER; note = 2'-O-methyl-guanosine-3'-phosphate
  modified_base 4: mod_base = OTHER; note = 2'-O-methyl-guanosine-3'-phosphate
  modified_base 5: mod_base = OTHER; note = 2'-deoxy-2'-fluoro-uridine-3'-phosphate
  modified_base 6: mod_base = OTHER; note = 2'-O-methyl-uridine-3'-phosphate
  modified_base 7: mod_base = OTHER; note = 2'-deoxy-2'-fluoro-guanosine-3'-phosphate
  modified_base 8: mod_base = OTHER; note = 2'-deoxy-2'-fluoro-uridine-3'-phosphate
  modified_base 9: mod_base = OTHER; note = 2'-deoxy-2'-fluoro-cytidine-3'-phosphate
  modified_base 10: mod_base = OTHER; note = 2'-O-methyl-uridine-3'-phosphate
  modified_base 11: mod_base = OTHER; note = 2'-O-methyl-uridine-3'-phosphate
  modified_base 12: mod_base = OTHER; note = 2'-O-methyl-cytidine-3'-phosphate
  modified_base 13: mod_base = OTHER; note = 2'-O-methyl-cytidine-3'-phosphate
  modified_base 14: mod_base = OTHER; note = 2'-O-methyl-adenosine-3'-phosphate
  modified_base 15: mod_base = OTHER; note = 2'-O-methyl-uridine-3'-phosphate
  modified_base 16: mod_base = OTHER; note = 2'-O-methyl-uridine-3'-phosphate
  modified_base 17: mod_base = OTHER; note = 2'-O-methyl-cytidine-3'-phosphate
  modified_base 18: mod_base = OTHER; note = 2'-O-methyl-cytidine-3'-phosphate
  modified_base 19: mod_base = OTHER; note = 2'-O-methyl-adenosine-3'-phosphate
caggttgtcttccattcca

SEQ ID NO: 1778 - RNA, 19 nt, synthetic construct
  source 1..19: mol_type = other RNA
  modified_base 1: mod_base = OTHER; note = 2'-O-methyl-adenosine-3'-phosphorothioate
  modified_base 2: mod_base = OTHER; note = 2'-O-methyl-guanosine-3'-phosphorothioate
  modified_base 3: mod_base = OTHER; note = 2'-O-methyl-guanosine-3'-phosphate
  modified_base 4: mod_base = OTHER; note = 2'-O-methyl-uridine-3'-phosphate
  modified_base 5: mod_base = OTHER; note = 2'-deoxy-2'-fluoro-uridine-3'-phosphate
  modified_base 6: mod_base = OTHER; note = 2'-O-methyl-guanosine-3'-phosphate
  modified_base 7: mod_base = OTHER; note = 2'-deoxy-2'-fluoro-uridine-3'-phosphate
  modified_base 8: mod_base = OTHER; note = 2'-deoxy-2'-fluoro-cytidine-3'-phosphate
  modified_base 9: mod_base = OTHER; note = 2'-deoxy-2'-fluoro-uridine-3'-phosphate
  modified_base 10: mod_base = OTHER; note = 2'-O-methyl-uridine-3'-phosphate
  modified_base 11: mod_base = OTHER; note = 2'-O-methyl-cytidine-3'-phosphate
  modified_base 12: mod_base = OTHER; note = 2'-O-methyl-cytidine-3'-phosphate
  modified_base 13: mod_base = OTHER; note = 2'-O-methyl-adenosine-3'-phosphate
  modified_base 14: mod_base = OTHER; note = 2'-O-methyl-uridine-3'-phosphate
  modified_base 15: mod_base = OTHER; note = 2'-O-methyl-uridine-3'-phosphate
  modified_base 16: mod_base = OTHER; note = 2'-O-methyl-cytidine-3'-phosphate
  modified_base 17: mod_base = OTHER; note = 2'-O-methyl-cytidine-3'-phosphate
  modified_base 18: mod_base = OTHER; note = 2'-O-methyl-adenosine-3'-phosphate
  modified_base 19: mod_base = OTHER; note = 2'-O-methyl-adenosine-3'-phosphate
aggttgtcttccattccaa

SEQ ID NO: 1779 - RNA, 19 nt, synthetic construct
  source 1..19: mol_type = other RNA
  modified_base 1: mod_base = OTHER; note = 2'-O-methyl-guanosine-3'-phosphorothioate
  modified_base 2: mod_base = OTHER; note = 2'-O-methyl-cytidine-3'-phosphorothioate
  modified_base 3: mod_base = OTHER; note = 2'-O-methyl-cytidine-3'-phosphate
  modified_base 4: mod_base = OTHER; note = 2'-O-methyl-uridine-3'-phosphate
  modified_base 5: mod_base = OTHER; note = 2'-deoxy-2'-fluoro-adenosine-3'-phosphate
  modified_base 6: mod_base = OTHER; note = 2'-O-methyl-adenosine-3'-phosphate
  modified_base 7: mod_base = OTHER; note = 2'-deoxy-2'-fluoro-cytidine-3'-phosphate
  modified_base 8: mod_base = OTHER; note = 2'-deoxy-2'-fluoro-adenosine-3'-phosphate
  modified_base 9: mod_base = OTHER; note = 2'-deoxy-2'-fluoro-uridine-3'-phosphate
  modified_base 10: mod_base = OTHER; note = 2'-O-methyl-cytidine-3'-phosphate
  modified_base 11: mod_base = OTHER; note = 2'-O-methyl-cytidine-3'-phosphate
  modified_base 12: mod_base = OTHER; note = 2'-O-methyl-adenosine-3'-phosphate
  modified_base 13: mod_base = OTHER; note = 2'-O-methyl-adenosine-3'-phosphate
  modified_base 14: mod_base = OTHER; note = 2'-O-methyl-uridine-3'-phosphate
  modified_base 15: mod_base = OTHER; note = 2'-O-methyl-guanosine-3'-phosphate
  modified_base 16: mod_base = OTHER; note = 2'-O-methyl-cytidine-3'-phosphate
  modified_base 17: mod_base = OTHER; note = 2'-O-methyl-adenosine-3'-phosphate
  modified_base 18: mod_base = OTHER; note = 2'-O-methyl-guanosine-3'-phosphate
  modified_base 19: mod_base = OTHER; note = 2'-O-methyl-adenosine-3'-phosphate
gcctaacatccaatgcaga

SEQ ID NO: 1780 - RNA, 19 nt, synthetic construct
  source 1..19: mol_type = other RNA
  modified_base 1: mod_base = OTHER; note = 2'-O-methyl-cytidine-3'-phosphorothioate
  modified_base 2: mod_base = OTHER; note = 2'-O-methyl-cytidine-3'-phosphorothioate
  modified_base 3: mod_base = OTHER; note = 2'-O-methyl-uridine-3'-phosphate
  modified_base 4: mod_base = OTHER; note = 2'-O-methyl-adenosine-3'-phosphate
  modified_base 5: mod_base = OTHER; note = 2'-deoxy-2'-fluoro-adenosine-3'-phosphate
  modified_base 6: mod_base = OTHER; note = 2'-O-methyl-cytidine-3'-phosphate
  modified_base 7: mod_base = OTHER; note = 2'-deoxy-2'-fluoro-adenosine-3'-phosphate
  modified_base 8: mod_base = OTHER; note = 2'-deoxy-2'-fluoro-uridine-3'-phosphate
  modified_base 9: mod_base = OTHER; note = 2'-deoxy-2'-fluoro-cytidine-3'-phosphate
  modified_base 10: mod_base = OTHER; note = 2'-O-methyl-cytidine-3'-phosphate
  modified_base 11: mod_base = OTHER; note = 2'-O-methyl-adenosine-3'-phosphate
  modified_base 12: mod_base = OTHER; note = 2'-O-methyl-adenosine-3'-phosphate
  modified_base 13: mod_base = OTHER; note = 2'-O-methyl-uridine-3'-phosphate
  modified_base 14: mod_base = OTHER; note = 2'-O-methyl-guanosine-3'-phosphate
  modified_base 15: mod_base = OTHER; note = 2'-O-methyl-cytidine-3'-phosphate
  modified_base 16: mod_base = OTHER; note = 2'-O-methyl-adenosine-3'-phosphate
  modified_base 17: mod_base = OTHER; note = 2'-O-methyl-guanosine-3'-phosphate
  modified_base 18: mod_base = OTHER; note = 2'-O-methyl-guanosine-3'-phosphate
  modified_base 19: mod_base = OTHER; note = 2'-O-methyl-adenosine-3'-phosphate
cctaacatccaatgcagga

SEQ ID NO: 1781 - RNA, 19 nt, synthetic construct
  source 1..19: mol_type = other RNA
  modified_base 1: mod_base = OTHER; note = 2'-O-methyl-cytidine-3'-phosphorothioate
  modified_base 2: mod_base = OTHER; note = 2'-O-methyl-uridine-3'-phosphorothioate
  modified_base 3: mod_base = OTHER; note = 2'-O-methyl-adenosine-3'-phosphate
  modified_base 4: mod_base = OTHER; note = 2'-O-methyl-adenosine-3'-phosphate
  modified_base 5: mod_base = OTHER; note = 2'-deoxy-2'-fluoro-cytidine-3'-phosphate
  modified_base 6: mod_base = OTHER; note = 2'-O-methyl-adenosine-3'-phosphate
  modified_base 7: mod_base = OTHER; note = 2'-deoxy-2'-fluoro-uridine-3'-phosphate
  modified_base 8: mod_base = OTHER; note = 2'-deoxy-2'-fluoro-cytidine-3'-phosphate
  modified_base 9: mod_base = OTHER; note = 2'-deoxy-2'-fluoro-cytidine-3'-phosphate
  modified_base 10: mod_base = OTHER; note = 2'-O-methyl-adenosine-3'-phosphate
  modified_base 11: mod_base = OTHER; note = 2'-O-methyl-adenosine-3'-phosphate
  modified_base 12: mod_base = OTHER; note = 2'-O-methyl-uridine-3'-phosphate
  modified_base 13: mod_base = OTHER; note = 2'-O-methyl-guanosine-3'-phosphate
  modified_base 14: mod_base = OTHER; note = 2'-O-methyl-cytidine-3'-phosphate
  modified_base 15: mod_base = OTHER; note = 2'-O-methyl-adenosine-3'-phosphate
  modified_base 16: mod_base = OTHER; note = 2'-O-methyl-guanosine-3'-phosphate
  modified_base 17: mod_base = OTHER; note = 2'-O-methyl-guanosine-3'-phosphate
  modified_base 18: mod_base = OTHER; note = 2'-O-methyl-cytidine-3'-phosphate
  modified_base 19: mod_base = OTHER; note = 2'-O-methyl-adenosine-3'-phosphate
ctaacatccaatgcaggca

SEQ ID NO: 1782 - RNA, 19 nt, synthetic construct
  source 1..19: mol_type = other RNA
  modified_base 1: mod_base = OTHER; note = 2'-O-methyl-uridine-3'-phosphorothioate
  modified_base 2: mod_base = OTHER; note = 2'-O-methyl-adenosine-3'-phosphorothioate
  modified_base 3: mod_base = OTHER; note = 2'-O-methyl-adenosine-3'-phosphate
  modified_base 4: mod_base = OTHER; note = 2'-O-methyl-cytidine-3'-phosphate
  modified_base 5: mod_base = OTHER; note = 2'-deoxy-2'-fluoro-adenosine-3'-phosphate
  modified_base 6: mod_base = OTHER; note = 2'-O-methyl-uridine-3'-phosphate
  modified_base 7: mod_base = OTHER; note = 2'-deoxy-2'-fluoro-cytidine-3'-phosphate
  modified_base 8: mod_base = OTHER; note = 2'-deoxy-2'-fluoro-cytidine-3'-phosphate
  modified_base 9: mod_base = OTHER; note = 2'-deoxy-2'-fluoro-adenosine-3'-phosphate
  modified_base 10: mod_base = OTHER; note = 2'-O-methyl-adenosine-3'-phosphate
  modified_base 11: mod_base = OTHER; note = 2'-O-methyl-uridine-3'-phosphate
  modified_base 12: mod_base = OTHER; note = 2'-O-methyl-guanosine-3'-phosphate
  modified_base 13: mod_base = OTHER; note = 2'-O-methyl-cytidine-3'-phosphate
  modified_base 14: mod_base = OTHER; note = 2'-O-methyl-adenosine-3'-phosphate
  modified_base 15: mod_base = OTHER; note = 2'-O-methyl-guanosine-3'-phosphate
  modified_base 16: mod_base = OTHER; note = 2'-O-methyl-guanosine-3'-phosphate
  modified_base 17: mod_base = OTHER; note = 2'-O-methyl-cytidine-3'-phosphate
  modified_base 18: mod_base = OTHER; note = 2'-O-methyl-adenosine-3'-phosphate
  modified_base 19: mod_base = OTHER; note = 2'-O-methyl-adenosine-3'-phosphate
taacatccaatgcaggcaa

SEQ ID NO: 1783 - RNA, 19 nt, synthetic construct
  source 1..19: mol_type = other RNA
  modified_base 1: mod_base = OTHER; note = 2'-O-methyl-adenosine-3'-phosphorothioate
  modified_base 2: mod_base = OTHER; note = 2'-O-methyl-adenosine-3'-phosphorothioate
  modified_base 3: mod_base = OTHER; note = 2'-O-methyl-cytidine-3'-phosphate
  modified_base 4: mod_base = OTHER; note = 2'-O-methyl-adenosine-3'-phosphate
  modified_base 5: mod_base = OTHER; note = 2'-deoxy-2'-fluoro-uridine-3'-phosphate
  modified_base 6: mod_base = OTHER; note = 2'-O-methyl-cytidine-3'-phosphate
  modified_base 7: mod_base = OTHER; note = 2'-deoxy-2'-fluoro-cytidine-3'-phosphate
  modified_base 8: mod_base = OTHER; note = 2'-deoxy-2'-fluoro-adenosine-3'-phosphate
  modified_base 9: mod_base = OTHER; note = 2'-deoxy-2'-fluoro-adenosine-3'-phosphate
  modified_base 10: mod_base = OTHER; note = 2'-O-methyl-uridine-3'-phosphate
  modified_base 11: mod_base = OTHER; note = 2'-O-methyl-guanosine-3'-phosphate
  modified_base 12: mod_base = OTHER; note = 2'-O-methyl-cytidine-3'-phosphate
  modified_base 13: mod_base = OTHER; note = 2'-O-methyl-adenosine-3'-phosphate
  modified_base 14: mod_base = OTHER; note = 2'-O-methyl-guanosine-3'-phosphate
  modified_base 15: mod_base = OTHER; note = 2'-O-methyl-guanosine-3'-phosphate
  modified_base 16: mod_base = OTHER; note = 2'-O-methyl-cytidine-3'-phosphate
  modified_base 17: mod_base = OTHER; note = 2'-O-methyl-adenosine-3'-phosphate
  modified_base 18: mod_base = OTHER; note = 2'-O-methyl-adenosine-3'-phosphate
  modified_base 19: mod_base = OTHER; note = 2'-O-methyl-adenosine-3'-phosphate
aacatccaatgcaggcaaa

SEQ ID NO: 1784 - RNA, 19 nt, synthetic construct
  source 1..19: mol_type = other RNA
  modified_base 1: mod_base = OTHER; note = 2'-O-methyl-adenosine-3'-phosphorothioate
  modified_base 2: mod_base = OTHER; note = 2'-O-methyl-cytidine-3'-phosphorothioate
  modified_base 3: mod_base = OTHER; note = 2'-O-methyl-adenosine-3'-phosphate
  modified_base 4: mod_base = OTHER; note = 2'-O-methyl-uridine-3'-phosphate
  modified_base 5: mod_base = OTHER; note = 2'-deoxy-2'-fluoro-cytidine-3'-phosphate
  modified_base 6: mod_base = OTHER; note = 2'-O-methyl-cytidine-3'-phosphate
  modified_base 7: mod_base = OTHER; note = 2'-deoxy-2'-fluoro-adenosine-3'-phosphate
  modified_base 8: mod_base = OTHER; note = 2'-deoxy-2'-fluoro-adenosine-3'-phosphate
  modified_base 9: mod_base = OTHER; note = 2'-deoxy-2'-fluoro-uridine-3'-phosphate
  modified_base 10: mod_base = OTHER; note = 2'-O-methyl-guanosine-3'-phosphate
  modified_base 11: mod_base = OTHER; note = 2'-O-methyl-cytidine-3'-phosphate
  modified_base 12: mod_base = OTHER; note = 2'-O-methyl-adenosine-3'-phosphate
  modified_base 13: mod_base = OTHER; note = 2'-O-methyl-guanosine-3'-phosphate
  modified_base 14: mod_base = OTHER; note = 2'-O-methyl-guanosine-3'-phosphate
  modified_base 15: mod_base = OTHER; note = 2'-O-methyl-cytidine-3'-phosphate
  modified_base 16: mod_base = OTHER; note = 2'-O-methyl-adenosine-3'-phosphate
  modified_base 17: mod_base = OTHER; note = 2'-O-methyl-adenosine-3'-phosphate
  modified_base 18: mod_base = OTHER; note = 2'-O-methyl-guanosine-3'-phosphate
  modified_base 19: mod_base = OTHER; note = 2'-O-methyl-adenosine-3'-phosphate
acatccaatgcaggcaaga

SEQ ID NO: 1785 - RNA, 19 nt, synthetic construct
  source 1..19: mol_type = other RNA
  modified_base 1: mod_base = OTHER; note = 2'-O-methyl-cytidine-3'-phosphorothioate
  modified_base 2: mod_base = OTHER; note = 2'-O-methyl-adenosine-3'-phosphorothioate
  modified_base 3: mod_base = OTHER; note = 2'-O-methyl-uridine-3'-phosphate
  modified_base 4: mod_base = OTHER; note = 2'-O-methyl-cytidine-3'-phosphate
  modified_base 5: mod_base = OTHER; note = 2'-deoxy-2'-fluoro-cytidine-3'-phosphate
  modified_base 6: mod_base = OTHER; note = 2'-O-methyl-adenosine-3'-phosphate
  modified_base 7: mod_base = OTHER; note = 2'-deoxy-2'-fluoro-adenosine-3'-phosphate
  modified_base 8: mod_base = OTHER; note = 2'-deoxy-2'-fluoro-uridine-3'-phosphate
  modified_base 9: mod_base = OTHER; note = 2'-deoxy-2'-fluoro-guanosine-3'-phosphate
  modified_base 10: mod_base = OTHER; note = 2'-O-methyl-cytidine-3'-phosphate
  modified_base 11: mod_base = OTHER; note = 2'-O-methyl-adenosine-3'-phosphate
  modified_base 12: mod_base = OTHER; note = 2'-O-methyl-guanosine-3'-phosphate
  modified_base 13: mod_base = OTHER; note = 2'-O-methyl-guanosine-3'-phosphate
  modified_base 14: mod_base = OTHER; note = 2'-O-methyl-cytidine-3'-phosphate
  modified_base 15: mod_base = OTHER; note = 2'-O-methyl-adenosine-3'-phosphate
  modified_base 16: mod_base = OTHER; note = 2'-O-methyl-adenosine-3'-phosphate
  modified_base 17: mod_base = OTHER; note = 2'-O-methyl-guanosine-3'-phosphate
  modified_base 18: mod_base = OTHER; note = 2'-O-methyl-guanosine-3'-phosphate
  modified_base 19: mod_base = OTHER; note = 2'-O-methyl-adenosine-3'-phosphate
catccaatgcaggcaagga

SEQ ID NO: 1786 - RNA, 19 nt, synthetic construct
  source 1..19: mol_type = other RNA
  modified_base 1: mod_base = OTHER; note = 2'-O-methyl-adenosine-3'-phosphorothioate
  modified_base 2: mod_base = OTHER; note = 2'-O-methyl-uridine-3'-phosphorothioate
  modified_base 3: mod_base = OTHER; note = 2'-O-methyl-cytidine-3'-phosphate
  modified_base 4: mod_base = OTHER; note = 2'-O-methyl-cytidine-3'-phosphate
  modified_base 5: mod_base = OTHER; note = 2'-deoxy-2'-fluoro-adenosine-3'-phosphate
  modified_base 6: mod_base = OTHER; note = 2'-O-methyl-adenosine-3'-phosphate
  modified_base 7: mod_base = OTHER; note = 2'-deoxy-2'-fluoro-uridine-3'-phosphate
  modified_base 8: mod_base = OTHER; note = 2'-deoxy-2'-fluoro-guanosine-3'-phosphate
  modified_base 9: mod_base = OTHER; note = 2'-deoxy-2'-fluoro-cytidine-3'-phosphate
  modified_base 10: mod_base = OTHER; note = 2'-O-methyl-adenosine-3'-phosphate
  modified_base 11: mod_base = OTHER; note = 2'-O-methyl-guanosine-3'-phosphate
  modified_base 12: mod_base = OTHER; note = 2'-O-methyl-guanosine-3'-phosphate
  modified_base 13: mod_base = OTHER; note = 2'-O-methyl-cytidine-3'-phosphate
  modified_base 14: mod_base = OTHER; note = 2'-O-methyl-adenosine-3'-phosphate
  modified_base 15: mod_base = OTHER; note = 2'-O-methyl-adenosine-3'-phosphate
  modified_base 16: mod_base = OTHER; note = 2'-O-methyl-guanosine-3'-phosphate
  modified_base 17: mod_base = OTHER; note = 2'-O-methyl-guanosine-3'-phosphate
  modified_base 18: mod_base = OTHER; note = 2'-O-methyl-adenosine-3'-phosphate
  modified_base 19: mod_base = OTHER; note = 2'-O-methyl-adenosine-3'-phosphate
atccaatgcaggcaaggaa

SEQ ID NO: 1787 - RNA, 19 nt, synthetic construct
  source 1..19: mol_type = other RNA
  modified_base 1: mod_base = OTHER; note = 2'-O-methyl-uridine-3'-phosphorothioate
  modified_base 2: mod_base = OTHER; note = 2'-O-methyl-cytidine-3'-phosphorothioate
  modified_base 3: mod_base = OTHER; note = 2'-O-methyl-cytidine-3'-phosphate
  modified_base 4: mod_base = OTHER; note = 2'-O-methyl-adenosine-3'-phosphate
  modified_base 5: mod_base = OTHER; note = 2'-deoxy-2'-fluoro-adenosine-3'-phosphate
  modified_base 6: mod_base = OTHER; note = 2'-O-methyl-uridine-3'-phosphate
  modified_base 7: mod_base = OTHER; note = 2'-deoxy-2'-fluoro-guanosine-3'-phosphate
  modified_base 8: mod_base = OTHER; note = 2'-deoxy-2'-fluoro-cytidine-3'-phosphate
  modified_base 9: mod_base = OTHER; note = 2'-deoxy-2'-fluoro-adenosine-3'-phosphate
  modified_base 10: mod_base = OTHER; note = 2'-O-methyl-guanosine-3'-phosphate
  modified_base 11: mod_base = OTHER; note = 2'-O-methyl-guanosine-3'-phosphate
  modified_base 12: mod_base = OTHER; note = 2'-O-methyl-cytidine-3'-phosphate
  modified_base 13: mod_base = OTHER; note = 2'-O-methyl-adenosine-3'-phosphate
  modified_base 14: mod_base = OTHER; note = 2'-O-methyl-adenosine-3'-phosphate
  modified_base 15: mod_base = OTHER; note = 2'-O-methyl-guanosine-3'-phosphate
  modified_base 16: mod_base = OTHER; note = 2'-O-methyl-guanosine-3'-phosphate
  modified_base 17: mod_base = OTHER; note = 2'-O-methyl-adenosine-3'-phosphate
  modified_base 18: mod_base = OTHER; note = 2'-O-methyl-adenosine-3'-phosphate
  modified_base 19: mod_base = OTHER; note = 2'-O-methyl-adenosine-3'-phosphate
tccaatgcaggcaaggaaa

SEQ ID NO: 1788 - RNA, 19 nt, synthetic construct
  source 1..19: mol_type = other RNA
  modified_base 1: mod_base = OTHER; note = 2'-O-methyl-cytidine-3'-phosphorothioate
  modified_base 2: mod_base = OTHER; note = 2'-O-methyl-cytidine-3'-phosphorothioate
  modified_base 3: mod_base = OTHER; note = 2'-O-methyl-adenosine-3'-phosphate
  modified_base 4: mod_base = OTHER; note = 2'-O-methyl-adenosine-3'-phosphate
  modified_base 5: mod_base = OTHER; note = 2'-deoxy-2'-fluoro-uridine-3'-phosphate
  modified_base 6: mod_base = OTHER; note = 2'-O-methyl-guanosine-3'-phosphate
  modified_base 7: mod_base = OTHER; note = 2'-deoxy-2'-fluoro-cytidine-3'-phosphate
  modified_base 8: mod_base = OTHER; note = 2'-deoxy-2'-fluoro-adenosine-3'-phosphate
  modified_base 9: mod_base = OTHER; note = 2'-deoxy-2'-fluoro-guanosine-3'-phosphate
  modified_base 10: mod_base = OTHER; note = 2'-O-methyl-guanosine-3'-phosphate
  modified_base 11: mod_base = OTHER; note = 2'-O-methyl-cytidine-3'-phosphate
  modified_base 12: mod_base = OTHER; note = 2'-O-methyl-adenosine-3'-phosphate
  modified_base 13: mod_base = OTHER; note = 2'-O-methyl-adenosine-3'-phosphate
  modified_base 14: mod_base = OTHER; note = 2'-O-methyl-guanosine-3'-phosphate
  modified_base 15: mod_base = OTHER; note = 2'-O-methyl-guanosine-3'-phosphate
  modified_base 16: mod_base = OTHER; note = 2'-O-methyl-adenosine-3'-phosphate
  modified_base 17: mod_base = OTHER; note = 2'-O-methyl-adenosine-3'-phosphate
  modified_base 18: mod_base = OTHER; note = 2'-O-methyl-adenosine-3'-phosphate
  modified_base 19: mod_base = OTHER; note = 2'-O-methyl-adenosine-3'-phosphate
ccaatgcaggcaaggaaaa

SEQ ID NO: 1789 - RNA, 19 nt, synthetic construct
  source 1..19: mol_type = other RNA
  modified_base 1: mod_base = OTHER; note = 2'-O-methyl-cytidine-3'-phosphorothioate
  modified_base 2: mod_base = OTHER; note = 2'-O-methyl-adenosine-3'-phosphorothioate
  modified_base 3: mod_base = OTHER; note = 2'-O-methyl-adenosine-3'-phosphate
  modified_base 4: mod_base = OTHER; note = 2'-O-methyl-uridine-3'-phosphate
  modified_base 5: mod_base = OTHER; note = 2'-deoxy-2'-fluoro-guanosine-3'-phosphate
  modified_base 6: mod_base = OTHER; note = 2'-O-methyl-cytidine-3'-phosphate
  modified_base 7: mod_base = OTHER; note = 2'-deoxy-2'-fluoro-adenosine-3'-phosphate
  modified_base 8: mod_base = OTHER; note = 2'-deoxy-2'-fluoro-guanosine-3'-phosphate
  modified_base 9: mod_base = OTHER; note = 2'-deoxy-2'-fluoro-guanosine-3'-phosphate
  modified_base 10: mod_base = OTHER; note = 2'-O-methyl-cytidine-3'-phosphate
  modified_base 11: mod_base = OTHER; note = 2'-O-methyl-adenosine-3'-phosphate
  modified_base 12: mod_base = OTHER; note = 2'-O-methyl-adenosine-3'-phosphate
  modified_base 13: mod_base = OTHER; note = 2'-O-methyl-guanosine-3'-phosphate
  modified_base 14: mod_base = OTHER; note = 2'-O-methyl-guanosine-3'-phosphate
  modified_base 15: mod_base = OTHER; note = 2'-O-methyl-adenosine-3'-phosphate
  modified_base 16: mod_base = OTHER; note = 2'-O-methyl-adenosine-3'-phosphate
  modified_base 17: mod_base = OTHER; note = 2'-O-methyl-adenosine-3'-phosphate
  modified_base 18: mod_base = OTHER; note = 2'-O-methyl-adenosine-3'-phosphate
  modified_base 19: mod_base = OTHER; note = 2'-O-methyl-adenosine-3'-phosphate
caatgcaggcaaggaaaaa

SEQ ID NO: 1790 - RNA, 19 nt, synthetic construct
  source 1..19: mol_type = other RNA
  modified_base 1: mod_base = OTHER; note = 2'-O-methyl-adenosine-3'-phosphorothioate
  modified_base 2: mod_base = OTHER; note = 2'-O-methyl-adenosine-3'-phosphorothioate
  modified_base 3: mod_base = OTHER; note = 2'-O-methyl-uridine-3'-phosphate
  modified_base 4: mod_base = OTHER; note = 2'-O-methyl-guanosine-3'-phosphate
  modified_base 5: mod_base = OTHER; note = 2'-deoxy-2'-fluoro-cytidine-3'-phosphate
  modified_base 6: mod_base = OTHER; note = 2'-O-methyl-adenosine-3'-phosphate
  modified_base 7: mod_base = OTHER; note = 2'-deoxy-2'-fluoro-guanosine-3'-phosphate
  modified_base 8: mod_base = OTHER; note = 2'-deoxy-2'-fluoro-guanosine-3'-phosphate
  modified_base 9: mod_base = OTHER; note = 2'-deoxy-2'-fluoro-cytidine-3'-phosphate
  modified_base 10: mod_base = OTHER; note = 2'-O-methyl-adenosine-3'-phosphate
  modified_base 11: mod_base = OTHER; note = 2'-O-methyl-adenosine-3'-phosphate
  modified_base 12: mod_base = OTHER; note = 2'-O-methyl-guanosine-3'-phosphate
  modified_base 13: mod_base = OTHER; note = 2'-O-methyl-guanosine-3'-phosphate
  modified_base 14: mod_base = OTHER; note = 2'-O-methyl-adenosine-3'-phosphate
  modified_base 15: mod_base = OTHER; note = 2'-O-methyl-adenosine-3'-phosphate
  modified_base 16: mod_base = OTHER; note = 2'-O-methyl-adenosine-3'-phosphate
  modified_base 17: mod_base = OTHER; note = 2'-O-methyl-adenosine-3'-phosphate
  modified_base 18: mod_base = OTHER; note = 2'-O-methyl-uridine-3'-phosphate
  modified_base 19: mod_base = OTHER; note = 2'-O-methyl-adenosine-3'-phosphate
aatgcaggcaaggaaaata

SEQ ID NO: 1791 - RNA, 19 nt, synthetic construct
  source 1..19: mol_type = other RNA
  modified_base 1: mod_base = OTHER; note = 2'-O-methyl-guanosine-3'-phosphorothioate
  modified_base 2: mod_base = OTHER; note = 2'-O-methyl-cytidine-3'-phosphorothioate
  modified_base 3: mod_base = OTHER; note = 2'-O-methyl-adenosine-3'-phosphate
  modified_base 4: mod_base = OTHER; note = 2'-O-methyl-adenosine-3'-phosphate
  modified_base 5: mod_base = OTHER; note = 2'-deoxy-2'-fluoro-guanosine-3'-phosphate
  modified_base 6: mod_base = OTHER; note = 2'-O-methyl-guanosine-3'-phosphate
  modified_base 7: mod_base = OTHER; note = 2'-deoxy-2'-fluoro-adenosine-3'-phosphate
  modified_base 8: mod_base = OTHER; note = 2'-deoxy-2'-fluoro-adenosine-3'-phosphate
  modified_base 9: mod_base = OTHER; note = 2'-deoxy-2'-fluoro-adenosine-3'-phosphate
  modified_base 10: mod_base = OTHER; note = 2'-O-methyl-adenosine-3'-phosphate
  modified_base 11: mod_base = OTHER; note = 2'-O-methyl-uridine-3'-phosphate
  modified_base 12: mod_base = OTHER; note = 2'-O-methyl-adenosine-3'-phosphate
  modified_base 13: mod_base = OTHER; note = 2'-O-methyl-adenosine-3'-phosphate
  modified_base 14: mod_base = OTHER; note = 2'-O-methyl-adenosine-3'-phosphate
  modified_base 15: mod_base = OTHER; note = 2'-O-methyl-adenosine-3'-phosphate
  modified_base 16: mod_base = OTHER; note = 2'-O-methyl-guanosine-3'-phosphate
  modified_base 17: mod_base = OTHER; note = 2'-O-methyl-adenosine-3'-phosphate
  modified_base 18: mod_base = OTHER; note = 2'-O-methyl-uridine-3'-phosphate
  modified_base 19: mod_base = OTHER; note = 2'-O-methyl-adenosine-3'-phosphate
gcaaggaaaataaaagata

SEQ ID NO: 1792 - RNA, 19 nt, synthetic construct
  source 1..19: mol_type = other RNA
  modified_base 1: mod_base = OTHER; note = 2'-O-methyl-adenosine-3'-phosphorothioate
  modified_base 2: mod_base = OTHER; note = 2'-O-methyl-adenosine-3'-phosphorothioate
  modified_base 3: mod_base = OTHER; note = 2'-O-methyl-uridine-3'-phosphate
  modified_base 4: mod_base = OTHER; note = 2'-O-methyl-adenosine-3'-phosphate
  modified_base 5: mod_base = OTHER; note = 2'-deoxy-2'-fluoro-adenosine-3'-phosphate
  modified_base 6: mod_base = OTHER; note = 2'-O-methyl-adenosine-3'-phosphate
  modified_base 7: mod_base = OTHER; note = 2'-deoxy-2'-fluoro-adenosine-3'-phosphate
  modified_base 8: mod_base = OTHER; note = 2'-deoxy-2'-fluoro-guanosine-3'-phosphate
  modified_base 9: mod_base = OTHER; note = 2'-deoxy-2'-fluoro-adenosine-3'-phosphate
  modified_base 10: mod_base = OTHER; note = 2'-O-methyl-uridine-3'-phosphate
  modified_base 11: mod_base = OTHER; note = 2'-O-methyl-uridine-3'-phosphate
  modified_base 12: mod_base = OTHER; note = 2'-O-methyl-uridine-3'-phosphate
  modified_base 13: mod_base = OTHER; note = 2'-O-methyl-cytidine-3'-phosphate
  modified_base 14: mod_base = OTHER; note = 2'-O-methyl-cytidine-3'-phosphate
  modified_base 15: mod_base = OTHER; note = 2'-O-methyl-adenosine-3'-phosphate
  modified_base 16: mod_base = OTHER; note = 2'-O-methyl-guanosine-3'-phosphate
  modified_base 17: mod_base = OTHER; note = 2'-O-methyl-uridine-3'-phosphate
  modified_base 18: mod_base = OTHER; note = 2'-O-methyl-guanosine-3'-phosphate
  modified_base 19: mod_base = OTHER; note = 2'-O-methyl-adenosine-3'-phosphate
aataaaagatttccagtga

SEQ ID NO: 1793 - RNA, 19 nt, synthetic construct
  source 1..19: mol_type = other RNA
  modified_base 1: mod_base = OTHER; note = 2'-O-methyl-adenosine-3'-phosphorothioate
  modified_base 2: mod_base = OTHER; note = 2'-O-methyl-uridine-3'-phosphorothioate
  modified_base 3: mod_base = OTHER; note = 2'-O-methyl-adenosine-3'-phosphate
  modified_base 4: mod_base = OTHER; note = 2'-O-methyl-adenosine-3'-phosphate
  modified_base 5: mod_base = OTHER; note = 2'-deoxy-2'-fluoro-adenosine-3'-phosphate
  modified_base 6: mod_base = OTHER; note = 2'-O-methyl-adenosine-3'-phosphate
  modified_base 7: mod_base = OTHER; note = 2'-deoxy-2'-fluoro-guanosine-3'-phosphate
  modified_base 8: mod_base = OTHER; note = 2'-deoxy-2'-fluoro-adenosine-3'-phosphate
  modified_base 9: mod_base = OTHER; note = 2'-deoxy-2'-fluoro-uridine-3'-phosphate
  modified_base 10: mod_base = OTHER; note = 2'-O-methyl-uridine-3'-phosphate
  modified_base 11: mod_base = OTHER; note = 2'-O-methyl-uridine-3'-phosphate
  modified_base 12: mod_base = OTHER; note = 2'-O-methyl-cytidine-3'-phosphate
  modified_base 13: mod_base = OTHER; note = 2'-O-methyl-cytidine-3'-phosphate
  modified_base 14: mod_base = OTHER; note = 2'-O-methyl-adenosine-3'-phosphate
  modified_base 15: mod_base = OTHER; note = 2'-O-methyl-guanosine-3'-phosphate
  modified_base 16: mod_base = OTHER; note = 2'-O-methyl-uridine-3'-phosphate
  modified_base 17: mod_base = OTHER; note = 2'-O-methyl-guanosine-3'-phosphate
  modified_base 18: mod_base = OTHER; note = 2'-O-methyl-adenosine-3'-phosphate
  modified_base 19: mod_base = OTHER; note = 2'-O-methyl-adenosine-3'-phosphate
ataaaagatttccagtgaa

SEQ ID NO: 1794 - RNA, 19 nt, synthetic construct
  source 1..19: mol_type = other RNA
  modified_base 1: mod_base = OTHER; note = 2'-O-methyl-uridine-3'-phosphorothioate
  modified_base 2: mod_base = OTHER; note = 2'-O-methyl-adenosine-3'-phosphorothioate
  modified_base 3: mod_base = OTHER; note = 2'-O-methyl-adenosine-3'-phosphate
  modified_base 4: mod_base = OTHER; note = 2'-O-methyl-adenosine-3'-phosphate
  modified_base 5: mod_base = OTHER; note = 2'-deoxy-2'-fluoro-adenosine-3'-phosphate
  modified_base 6: mod_base = OTHER; note = 2'-O-methyl-guanosine-3'-phosphate
  modified_base 7: mod_base = OTHER; note = 2'-deoxy-2'-fluoro-adenosine-3'-phosphate
  modified_base 8: mod_base = OTHER; note = 2'-deoxy-2'-fluoro-uridine-3'-phosphate
  modified_base 9: mod_base = OTHER; note = 2'-deoxy-2'-fluoro-uridine-3'-phosphate
  modified_base 10: mod_base = OTHER; note = 2'-O-methyl-uridine-3'-phosphate
  modified_base 11: mod_base = OTHER; note = 2'-O-methyl-cytidine-3'-phosphate
  modified_base 12: mod_base = OTHER; note = 2'-O-methyl-cytidine-3'-phosphate
  modified_base 13: mod_base = OTHER; note = 2'-O-methyl-adenosine-3'-phosphate
  modified_base 14: mod_base = OTHER; note = 2'-O-methyl-guanosine-3'-phosphate
  modified_base 15: mod_base = OTHER; note = 2'-O-methyl-uridine-3'-phosphate
  modified_base 16: mod_base = OTHER; note = 2'-O-methyl-guanosine-3'-phosphate
  modified_base 17: mod_base = OTHER; note = 2'-O-methyl-adenosine-3'-phosphate
  modified_base 18: mod_base = OTHER; note = 2'-O-methyl-cytidine-3'-phosphate
  modified_base 19: mod_base = OTHER; note = 2'-O-methyl-adenosine-3'-phosphate
taaaagatttccagtgaca

SEQ ID NO: 1795 - RNA, 19 nt, synthetic construct
  source 1..19: mol_type = other RNA
  modified_base 1: mod_base = OTHER; note = 2'-O-methyl-adenosine-3'-phosphorothioate
  modified_base 2: mod_base = OTHER; note = 2'-O-methyl-adenosine-3'-phosphorothioate
  modified_base 3: mod_base = OTHER; note = 2'-O-methyl-adenosine-3'-phosphate
  modified_base 4: mod_base = OTHER; note = 2'-O-methyl-adenosine-3'-phosphate
  modified_base 5: mod_base = OTHER; note = 2'-deoxy-2'-fluoro-guanosine-3'-phosphate
  modified_base 6: mod_base = OTHER; note = 2'-O-methyl-adenosine-3'-phosphate
  modified_base 7: mod_base = OTHER; note = 2'-deoxy-2'-fluoro-uridine-3'-phosphate
  modified_base 8: mod_base = OTHER; note = 2'-deoxy-2'-fluoro-uridine-3'-phosphate
  modified_base 9: mod_base = OTHER; note = 2'-deoxy-2'-fluoro-uridine-3'-phosphate
  modified_base 10: mod_base = OTHER; note = 2'-O-methyl-cytidine-3'-phosphate
  modified_base 11: mod_base = OTHER; note = 2'-O-methyl-cytidine-3'-phosphate
  modified_base 12: mod_base = OTHER; note = 2'-O-methyl-adenosine-3'-phosphate
  modified_base 13: mod_base = OTHER; note = 2'-O-methyl-guanosine-3'-phosphate
  modified_base 14: mod_base = OTHER; note = 2'-O-methyl-uridine-3'-phosphate
  modified_base 15: mod_base = OTHER; note = 2'-O-methyl-guanosine-3'-phosphate
  modified_base 16: mod_base = OTHER; note = 2'-O-methyl-adenosine-3'-phosphate
  modified_base 17: mod_base = OTHER; note = 2'-O-methyl-cytidine-3'-phosphate
  modified_base 18: mod_base = OTHER; note = 2'-O-methyl-adenosine-3'-phosphate
  modified_base 19: mod_base = OTHER; note = 2'-O-methyl-adenosine-3'-phosphate
aaaagatttccagtgacaa

SEQ ID NO: 1796 - RNA, 19 nt, synthetic construct
  source 1..19: mol_type = other RNA
  modified_base 1: mod_base = OTHER; note = 2'-O-methyl-uridine-3'-phosphorothioate
  modified_base 2: mod_base = OTHER; note = 2'-O-methyl-adenosine-3'-phosphorothioate
  modified_base 3: mod_base = OTHER; note = 2'-O-methyl-uridine-3'-phosphate
  modified_base 4: mod_base = OTHER; note = 2'-O-methyl-adenosine-3'-phosphate
  modified_base 5: mod_base = OTHER; note = 2'-deoxy-2'-fluoro-uridine-3'-phosphate
  modified_base 6: mod_base = OTHER; note = 2'-O-methyl-guanosine-3'-phosphate
  modified_base 7: mod_base = OTHER; note = 2'-deoxy-2'-fluoro-adenosine-3'-phosphate
  modified_base 8: mod_base = OTHER; note = 2'-deoxy-2'-fluoro-adenosine-3'-phosphate
  modified_base 9: mod_base = OTHER; note = 2'-deoxy-2'-fluoro-uridine-3'-phosphate
  modified_base 10: mod_base = OTHER; note = 2'-O-methyl-uridine-3'-phosphate
  modified_base 11: mod_base = OTHER; note = 2'-O-methyl-cytidine-3'-phosphate
  modified_base 12: mod_base = OTHER; note = 2'-O-methyl-uridine-3'-phosphate
  modified_base 13: mod_base = OTHER; note = 2'-O-methyl-cytidine-3'-phosphate
  modified_base 14: mod_base = OTHER; note = 2'-O-methyl-uridine-3'-phosphate
  modified_base 15: mod_base = OTHER; note = 2'-O-methyl-cytidine-3'-phosphate
  modified_base 16: mod_base = OTHER; note = 2'-O-methyl-uridine-3'-phosphate
  modified_base 17: mod_base = OTHER; note = 2'-O-methyl-cytidine-3'-phosphate
  modified_base 18: mod_base = OTHER; note = 2'-O-methyl-cytidine-3'-phosphate
  modified_base 19: mod_base = OTHER; note = 2'-O-methyl-adenosine-3'-phosphate
tatatgaattctctctcca

SEQ ID NO: 1797 - RNA, 19 nt, synthetic construct
  source 1..19: mol_type = other RNA
  modified_base 1: mod_base = OTHER; note = 2'-O-methyl-adenosine-3'-phosphorothioate
  modified_base 2: mod_base = OTHER; note = 2'-O-methyl-uridine-3'-phosphorothioate
  modified_base 3: mod_base = OTHER; note = 2'-O-methyl-adenosine-3'-phosphate
  modified_base 4: mod_base = OTHER; note = 2'-O-methyl-uridine-3'-phosphate
  modified_base 5: mod_base = OTHER; note = 2'-deoxy-2'-fluoro-guanosine-3'-phosphate
  modified_base 6: mod_base = OTHER; note = 2'-O-methyl-adenosine-3'-phosphate
  modified_base 7: mod_base = OTHER; note = 2'-deoxy-2'-fluoro-adenosine-3'-phosphate
  modified_base 8: mod_base = OTHER; note = 2'-deoxy-2'-fluoro-uridine-3'-phosphate
  modified_base 9: mod_base = OTHER; note = 2'-deoxy-2'-fluoro-uridine-3'-phosphate
  modified_base 10: mod_base = OTHER; note = 2'-O-methyl-cytidine-3'-phosphate
  modified_base 11: mod_base = OTHER; note = 2'-O-methyl-uridine-3'-phosphate
  modified_base 12: mod_base = OTHER; note = 2'-O-methyl-cytidine-3'-phosphate
  modified_base 13: mod_base = OTHER; note = 2'-O-methyl-uridine-3'-phosphate
  modified_base 14: mod_base = OTHER; note = 2'-O-methyl-cytidine-3'-phosphate
  modified_base 15: mod_base = OTHER; note = 2'-O-methyl-uridine-3'-phosphate
  modified_base 16: mod_base = OTHER; note = 2'-O-methyl-cytidine-3'-phosphate
  modified_base 17: mod_base = OTHER; note = 2'-O-methyl-cytidine-3'-phosphate
  modified_base 18: mod_base = OTHER; note = 2'-O-methyl-adenosine-3'-phosphate
  modified_base 19: mod_base = OTHER; note = 2'-O-methyl-adenosine-3'-phosphate
atatgaattctctctccaa

SEQ ID NO: 1798 - RNA, 19 nt, synthetic construct
  source 1..19: mol_type = other RNA
  modified_base 1: mod_base = OTHER; note = 2'-O-methyl-uridine-3'-phosphorothioate
  modified_base 2: mod_base = OTHER; note = 2'-O-methyl-adenosine-3'-phosphorothioate
  modified_base 3: mod_base = OTHER; note = 2'-O-methyl-uridine-3'-phosphate
  modified_base 4: mod_base = OTHER; note = 2'-O-methyl-guanosine-3'-phosphate
  modified_base 5: mod_base = OTHER; note = 2'-deoxy-2'-fluoro-adenosine-3'-phosphate
  modified_base 6: mod_base = OTHER; note = 2'-O-methyl-adenosine-3'-phosphate
  modified_base 7: mod_base = OTHER; note = 2'-deoxy-2'-fluoro-uridine-3'-phosphate
  modified_base 8: mod_base = OTHER; note = 2'-deoxy-2'-fluoro-uridine-3'-phosphate
  modified_base 9: mod_base = OTHER; note = 2'-deoxy-2'-fluoro-cytidine-3'-phosphate
  modified_base 10: mod_base = OTHER; note = 2'-O-methyl-uridine-3'-phosphate
  modified_base 11: mod_base = OTHER; note = 2'-O-methyl-cytidine-3'-phosphate
  modified_base 12: mod_base = OTHER; note = 2'-O-methyl-uridine-3'-phosphate
  modified_base 13: mod_base = OTHER; note = 2'-O-methyl-cytidine-3'-phosphate
  modified_base 14: mod_base = OTHER; note = 2'-O-methyl-uridine-3'-phosphate
  modified_base 15: mod_base = OTHER; note = 2'-O-methyl-cytidine-3'-phosphate
  modified_base 16: mod_base = OTHER; note = 2'-O-methyl-cytidine-3'-phosphate
  modified_base 17: mod_base = OTHER; note = 2'-O-methyl-adenosine-3'-phosphate
  modified_base 18: mod_base = OTHER; note = 2'-O-methyl-adenosine-3'-phosphate
  modified_base 19: mod_base = OTHER; note = 2'-O-methyl-adenosine-3'-phosphate
tatgaattctctctccaaa

SEQ ID NO: 1799 - RNA, 19 nt, synthetic construct
  source 1..19: mol_type = other RNA
  modified_base 1: mod_base = OTHER; note = 2'-O-methyl-adenosine-3'-phosphorothioate
  modified_base 2: mod_base = OTHER; note = 2'-O-methyl-uridine-3'-phosphorothioate
  modified_base 3: mod_base = OTHER; note = 2'-O-methyl-guanosine-3'-phosphate
  modified_base 4: mod_base = OTHER; note = 2'-O-methyl-adenosine-3'-phosphate
  modified_base 5: mod_base = OTHER; note = 2'-deoxy-2'-fluoro-adenosine-3'-phosphate
  modified_base 6: mod_base = OTHER; note = 2'-O-methyl-uridine-3'-phosphate
  modified_base 7: mod_base = OTHER; note = 2'-deoxy-2'-fluoro-uridine-3'-phosphate
  modified_base 8: mod_base = OTHER; note = 2'-deoxy-2'-fluoro-cytidine-3'-phosphate
  modified_base 9: mod_base = OTHER; note = 2'-deoxy-2'-fluoro-uridine-3'-phosphate
  modified_base 10: mod_base = OTHER; note = 2'-O-methyl-cytidine-3'-phosphate
  modified_base 11: mod_base = OTHER; note = 2'-O-methyl-uridine-3'-phosphate
  modified_base 12: mod_base = OTHER; note = 2'-O-methyl-cytidine-3'-phosphate
  modified_base 13: mod_base = OTHER; note = 2'-O-methyl-uridine-3'-phosphate
  modified_base 14: mod_base = OTHER; note = 2'-O-methyl-cytidine-3'-phosphate
  modified_base 15: mod_base = OTHER; note = 2'-O-methyl-cytidine-3'-phosphate
  modified_base 16: mod_base = OTHER; note = 2'-O-methyl-adenosine-3'-phosphate
  modified_base 17: mod_base = OTHER; note = 2'-O-methyl-adenosine-3'-phosphate
  modified_base 18: mod_base = OTHER; note = 2'-O-methyl-adenosine-3'-phosphate
  modified_base 19: mod_base = OTHER; note = 2'-O-methyl-adenosine-3'-phosphate
atgaattctctctccaaaa

SEQ ID NO: 1800 - RNA, 19 nt, synthetic construct
  source 1..19: mol_type = other RNA
  modified_base 1: mod_base = OTHER; note = 2'-O-methyl-uridine-3'-phosphorothioate
  modified_base 2: mod_base = OTHER; note = 2'-O-methyl-guanosine-3'-phosphorothioate
  modified_base 3: mod_base = OTHER; note = 2'-O-methyl-adenosine-3'-phosphate
  modified_base 4: mod_base = OTHER; note = 2'-O-methyl-adenosine-3'-phosphate
  modified_base 5: mod_base = OTHER; note = 2'-deoxy-2'-fluoro-uridine-3'-phosphate
  modified_base 6: mod_base = OTHER; note = 2'-O-methyl-uridine-3'-phosphate
  modified_base 7: mod_base = OTHER; note = 2'-deoxy-2'-fluoro-cytidine-3'-phosphate
  modified_base 8: mod_base = OTHER; note = 2'-deoxy-2'-fluoro-uridine-3'-phosphate
  modified_base 9: mod_base = OTHER; note = 2'-deoxy-2'-fluoro-cytidine-3'-phosphate
  modified_base 10: mod_base = OTHER; note = 2'-O-methyl-uridine-3'-phosphate
  modified_base 11: mod_base = OTHER; note = 2'-O-methyl-cytidine-3'-phosphate
  modified_base 12: mod_base = OTHER; note = 2'-O-methyl-uridine-3'-phosphate
  modified_base 13: mod_base = OTHER; note = 2'-O-methyl-cytidine-3'-phosphate
  modified_base 14: mod_base = OTHER; note = 2'-O-methyl-cytidine-3'-phosphate
  modified_base 15: mod_base = OTHER; note = 2'-O-methyl-adenosine-3'-phosphate
  modified_base 16: mod_base = OTHER; note = 2'-O-methyl-adenosine-3'-phosphate
  modified_base 17: mod_base = OTHER; note = 2'-O-methyl-adenosine-3'-phosphate
  modified_base 18: mod_base = OTHER; note = 2'-O-methyl-uridine-3'-phosphate
  modified_base 19: mod_base = OTHER; note = 2'-O-methyl-adenosine-3'-phosphate
tgaattctctctccaaata

SEQ ID NO: 1801 - RNA, 19 nt, synthetic construct
  source 1..19: mol_type = other RNA
  modified_base 1: mod_base = OTHER; note = 2'-O-methyl-guanosine-3'-phosphorothioate
  modified_base 2: mod_base = OTHER; note = 2'-O-methyl-adenosine-3'-phosphorothioate
  modified_base 3: mod_base = OTHER; note = 2'-O-methyl-adenosine-3'-phosphate
  modified_base 4: mod_base = OTHER; note = 2'-O-methyl-uridine-3'-phosphate
  modified_base 5: mod_base = OTHER; note = 2'-deoxy-2'-fluoro-uridine-3'-phosphate
  modified_base 6: mod_base = OTHER; note = 2'-O-methyl-cytidine-3'-phosphate
  modified_base 7: mod_base = OTHER; note = 2'-deoxy-2'-fluoro-uridine-3'-phosphate
  modified_base 8: mod_base = OTHER; note = 2'-deoxy-2'-fluoro-cytidine-3'-phosphate
  modified_base 9: mod_base = OTHER; note = 2'-deoxy-2'-fluoro-uridine-3'-phosphate
  modified_base 10: mod_base = OTHER; note = 2'-O-methyl-cytidine-3'-phosphate
  modified_base 11: mod_base = OTHER; note = 2'-O-methyl-uridine-3'-phosphate
  modified_base 12: mod_base = OTHER; note = 2'-O-methyl-cytidine-3'-phosphate
  modified_base 13: mod_base = OTHER; note = 2'-O-methyl-cytidine-3'-phosphate
  modified_base 14: mod_base = OTHER; note = 2'-O-methyl-adenosine-3'-phosphate
  modified_base 15: mod_base = OTHER; note = 2'-O-methyl-adenosine-3'-phosphate
  modified_base 16: mod_base = OTHER; note = 2'-O-methyl-adenosine-3'-phosphate
  modified_base 17: mod_base = OTHER; note = 2'-O-methyl-uridine-3'-phosphate
  modified_base 18: mod_base = OTHER; note = 2'-O-methyl-adenosine-3'-phosphate
  modified_base 19: mod_base = OTHER; note = 2'-O-methyl-adenosine-3'-phosphate
gaattctctctccaaataa

SEQ ID NO: 1802 - RNA, 19 nt, synthetic construct
  source 1..19: mol_type = other RNA
  modified_base 1: mod_base = OTHER; note = 2'-O-methyl-adenosine-3'-phosphorothioate
  modified_base 2: mod_base = OTHER; note = 2'-O-methyl-adenosine-3'-phosphorothioate
  modified_base 3: mod_base = OTHER; note = 2'-O-methyl-uridine-3'-phosphate
  modified_base 4: mod_base = OTHER; note = 2'-O-methyl-uridine-3'-phosphate
  modified_base 5: mod_base = OTHER; note = 2'-deoxy-2'-fluoro-cytidine-3'-phosphate
  modified_base 6: mod_base = OTHER; note = 2'-O-methyl-uridine-3'-phosphate
  modified_base 7: mod_base = OTHER; note = 2'-deoxy-2'-fluoro-cytidine-3'-phosphate
  modified_base 8: mod_base = OTHER; note = 2'-deoxy-2'-fluoro-uridine-3'-phosphate
  modified_base 9: mod_base = OTHER; note = 2'-deoxy-2'-fluoro-cytidine-3'-phosphate
  modified_base 10: mod_base = OTHER; note = 2'-O-methyl-uridine-3'-phosphate
  modified_base 11: mod_base = OTHER; note = 2'-O-methyl-cytidine-3'-phosphate
  modified_base 12: mod_base = OTHER; note = 2'-O-methyl-cytidine-3'-phosphate
  modified_base 13: mod_base = OTHER; note = 2'-O-methyl-adenosine-3'-phosphate
  modified_base 14: mod_base = OTHER; note = 2'-O-methyl-adenosine-3'-phosphate
  modified_base 15: mod_base = OTHER; note = 2'-O-methyl-adenosine-3'-phosphate
  modified_base 16: mod_base = OTHER; note = 2'-O-methyl-uridine-3'-phosphate
  modified_base 17: mod_base = OTHER; note = 2'-O-methyl-adenosine-3'-phosphate
  modified_base 18: mod_base = OTHER; note = 2'-O-methyl-uridine-3'-phosphate
  modified_base 19: mod_base = OTHER; note = 2'-O-methyl-adenosine-3'-phosphate
aattctctctccaaatata

SEQ ID NO: 1803 - RNA, 19 nt, synthetic construct
  source 1..19: mol_type = other RNA
  modified_base 1: mod_base = OTHER; note = 2'-O-methyl-adenosine-3'-phosphorothioate
  modified_base 2: mod_base = OTHER; note = 2'-O-methyl-uridine-3'-phosphorothioate
  modified_base 3: mod_base = OTHER; note = 2'-O-methyl-uridine-3'-phosphate
  modified_base 4: mod_base = OTHER; note = 2'-O-methyl-cytidine-3'-phosphate
  modified_base 5: mod_base = OTHER; note = 2'-deoxy-2'-fluoro-uridine-3'-phosphate
  modified_base 6: mod_base = OTHER; note = 2'-O-methyl-cytidine-3'-phosphate
  modified_base 7: mod_base = OTHER; note = 2'-deoxy-2'-fluoro-uridine-3'-phosphate
  modified_base 8: mod_base = OTHER; note = 2'-deoxy-2'-fluoro-cytidine-3'-phosphate
  modified_base 9: mod_base = OTHER; note = 2'-deoxy-2'-fluoro-uridine-3'-phosphate
  modified_base 10: mod_base = OTHER; note = 2'-O-methyl-cytidine-3'-phosphate
  modified_base 11: mod_base = OTHER; note = 2'-O-methyl-cytidine-3'-phosphate
  modified_base 12: mod_base = OTHER; note = 2'-O-methyl-adenosine-3'-phosphate
  modified_base 13: mod_base = OTHER; note = 2'-O-methyl-adenosine-3'-phosphate
  modified_base 14: mod_base = OTHER; note = 2'-O-methyl-adenosine-3'-phosphate
  modified_base 15: mod_base = OTHER; note = 2'-O-methyl-uridine-3'-phosphate
  modified_base 16: mod_base = OTHER; note = 2'-O-methyl-adenosine-3'-phosphate
  modified_base 17: mod_base = OTHER; note = 2'-O-methyl-uridine-3'-phosphate
  modified_base 18: mod_base = OTHER; note = 2'-O-methyl-uridine-3'-phosphate
  modified_base 19: mod_base = OTHER; note = 2'-O-methyl-adenosine-3'-phosphate
attctctctccaaatatta

SEQ ID NO: 1804 - RNA, 19 nt, synthetic construct
  source 1..19: mol_type = other RNA
  modified_base 1: mod_base = OTHER; note = 2'-O-methyl-uridine-3'-phosphorothioate
  modified_base 2: mod_base = OTHER; note = 2'-O-methyl-uridine-3'-phosphorothioate
  modified_base 3: mod_base = OTHER; note = 2'-O-methyl-guanosine-3'-phosphate
  modified_base 4: mod_base = OTHER; note = 2'-O-methyl-adenosine-3'-phosphate
  modified_base 5: mod_base = OTHER; note = 2'-deoxy-2'-fluoro-adenosine-3'-phosphate
  modified_base 6: mod_base = OTHER; note = 2'-O-methyl-adenosine-3'-phosphate
  modified_base 7: mod_base = OTHER; note = 2'-deoxy-2'-fluoro-uridine-3'-phosphate
  modified_base 8: mod_base = OTHER; note = 2'-deoxy-2'-fluoro-guanosine-3'-phosphate
  modified_base 9: mod_base = OTHER; note = 2'-deoxy-2'-fluoro-adenosine-3'-phosphate
  modified_base 10: mod_base = OTHER; note = 2'-O-methyl-adenosine-3'-phosphate
  modified_base 11: mod_base = OTHER; note = 2'-O-methyl-cytidine-3'-phosphate
  modified_base 12: mod_base = OTHER; note = 2'-O-methyl-uridine-3'-phosphate
  modified_base 13: mod_base = OTHER; note = 2'-O-methyl-uridine-3'-phosphate
  modified_base 14: mod_base = OTHER; note = 2'-O-methyl-guanosine-3'-phosphate
  modified_base 15: mod_base = OTHER; note = 2'-O-methyl-uridine-3'-phosphate
  modified_base 16: mod_base = OTHER; note = 2'-O-methyl-uridine-3'-phosphate
  modified_base 17: mod_base = OTHER; note = 2'-O-methyl-guanosine-3'-phosphate
  modified_base 18: mod_base = OTHER; note = 2'-O-methyl-guanosine-3'-phosphate
  modified_base 19: mod_base = OTHER; note = 2'-O-methyl-adenosine-3'-phosphate
ttgaaatgaacttgttgga

SEQ ID NO: 1805 - RNA, 19 nt, synthetic construct
  source 1..19: mol_type = other RNA
  modified_base 1: mod_base = OTHER; note = 2'-O-methyl-guanosine-3'-phosphorothioate
  modified_base 2: mod_base = OTHER; note = 2'-O-methyl-adenosine-3'-phosphorothioate
  modified_base 3: mod_base = OTHER; note = 2'-O-methyl-adenosine-3'-phosphate
  modified_base 4: mod_base = OTHER; note = 2'-O-methyl-adenosine-3'-phosphate
  modified_base 5: mod_base = OTHER; note = 2'-deoxy-2'-fluoro-uridine-3'-phosphate
  modified_base 6: mod_base = OTHER; note = 2'-O-methyl-guanosine-3'-phosphate
  modified_base 7: mod_base = OTHER; note = 2'-deoxy-2'-fluoro-adenosine-3'-phosphate
  modified_base 8: mod_base = OTHER; note = 2'-deoxy-2'-fluoro-adenosine-3'-phosphate
  modified_base 9: mod_base = OTHER; note = 2'-deoxy-2'-fluoro-cytidine-3'-phosphate
  modified_base 10: mod_base = OTHER; note = 2'-O-methyl-uridine-3'-phosphate
  modified_base 11: mod_base = OTHER; note = 2'-O-methyl-uridine-3'-phosphate
  modified_base 12: mod_base = OTHER; note = 2'-O-methyl-guanosine-3'-phosphate
  modified_base 13: mod_base = OTHER; note = 2'-O-methyl-uridine-3'-phosphate
  modified_base 14: mod_base = OTHER; note = 2'-O-methyl-uridine-3'-phosphate
  modified_base 15: mod_base = OTHER; note = 2'-O-methyl-guanosine-3'-phosphate
  modified_base 16: mod_base = OTHER; note = 2'-O-methyl-guanosine-3'-phosphate
  modified_base 17: mod_base = OTHER; note = 2'-O-methyl-cytidine-3'-phosphate
  modified_base 18: mod_base = OTHER; note = 2'-O-methyl-cytidine-3'-phosphate
  modified_base 19: mod_base = OTHER; note = 2'-O-methyl-adenosine-3'-phosphate
gaaatgaacttgttggcca

SEQ ID NO: 1806 - RNA, 19 nt, synthetic construct
  source 1..19: mol_type = other RNA
  modified_base 1: mod_base = OTHER; note = 2'-O-methyl-adenosine-3'-phosphorothioate
  modified_base 2: mod_base = OTHER; note = 2'-O-methyl-adenosine-3'-phosphorothioate
  modified_base 3: mod_base = OTHER; note = 2'-O-methyl-adenosine-3'-phosphate
  modified_base 4: mod_base = OTHER; note = 2'-O-methyl-uridine-3'-phosphate
  modified_base 5: mod_base = OTHER; note = 2'-deoxy-2'-fluoro-guanosine-3'-phosphate
  modified_base 6: mod_base = OTHER; note = 2'-O-methyl-adenosine-3'-phosphate
  modified_base 7: mod_base = OTHER; note = 2'-deoxy-2'-fluoro-adenosine-3'-phosphate
  modified_base 8: mod_base = OTHER; note = 2'-deoxy-2'-fluoro-cytidine-3'-phosphate
  modified_base 9: mod_base = OTHER; note = 2'-deoxy-2'-fluoro-uridine-3'-phosphate
  modified_base 10: mod_base = OTHER; note = 2'-O-methyl-uridine-3'-phosphate
  modified_base 11: mod_base = OTHER; note = 2'-O-methyl-guanosine-3'-phosphate
  modified_base 12: mod_base = OTHER; note = 2'-O-methyl-uridine-3'-phosphate
  modified_base 13: mod_base = OTHER; note = 2'-O-methyl-uridine-3'-phosphate
  modified_base 14: mod_base = OTHER; note = 2'-O-methyl-guanosine-3'-phosphate
  modified_base 15: mod_base = OTHER; note = 2'-O-methyl-guanosine-3'-phosphate
  modified_base 16: mod_base = OTHER; note = 2'-O-methyl-cytidine-3'-phosphate
  modified_base 17: mod_base = OTHER; note = 2'-O-methyl-cytidine-3'-phosphate
  modified_base 18: mod_base = OTHER; note = 2'-O-methyl-cytidine-3'-phosphate
  modified_base 19: mod_base = OTHER; note = 2'-O-methyl-adenosine-3'-phosphate
aaatgaacttgttggccca

SEQ ID NO: 1807 - RNA, 19 nt, synthetic construct
  source 1..19: mol_type = other RNA
  modified_base 1: mod_base = OTHER; note = 2'-O-methyl-adenosine-3'-phosphorothioate
  modified_base 2: mod_base = OTHER; note = 2'-O-methyl-adenosine-3'-phosphorothioate
  modified_base 3: mod_base = OTHER; note = 2'-O-methyl-uridine-3'-phosphate
  modified_base 4: mod_base = OTHER; note = 2'-O-methyl-guanosine-3'-phosphate
  modified_base 5: mod_base = OTHER; note = 2'-deoxy-2'-fluoro-adenosine-3'-phosphate
  modified_base 6: mod_base = OTHER; note = 2'-O-methyl-adenosine-3'-phosphate
  modified_base 7: mod_base = OTHER; note = 2'-deoxy-2'-fluoro-cytidine-3'-phosphate
  modified_base 8: mod_base = OTHER; note = 2'-deoxy-2'-fluoro-uridine-3'-phosphate
  modified_base 9: mod_base = OTHER; note = 2'-deoxy-2'-fluoro-uridine-3'-phosphate
  modified_base 10: mod_base = OTHER; note = 2'-O-methyl-guanosine-3'-phosphate
  modified_base 11: mod_base = OTHER; note = 2'-O-methyl-uridine-3'-phosphate
  modified_base 12: mod_base = OTHER; note = 2'-O-methyl-uridine-3'-phosphate
  modified_base 13: mod_base = OTHER; note = 2'-O-methyl-guanosine-3'-phosphate
  modified_base 14: mod_base = OTHER; note = 2'-O-methyl-guanosine-3'-phosphate
  modified_base 15: mod_base = OTHER; note = 2'-O-methyl-cytidine-3'-phosphate
  modified_base 16: mod_base = OTHER; note = 2'-O-methyl-cytidine-3'-phosphate
  modified_base 17: mod_base = OTHER; note = 2'-O-methyl-cytidine-3'-phosphate
  modified_base 18: mod_base = OTHER; note = 2'-O-methyl-adenosine-3'-phosphate
  modified_base 19: mod_base = OTHER; note = 2'-O-methyl-adenosine-3'-phosphate
aatgaacttgttggcccaa

SEQ ID NO: 1808 - RNA, 19 nt, synthetic construct
  source 1..19: mol_type = other RNA
  modified_base 1: mod_base = OTHER; note = 2'-O-methyl-adenosine-3'-phosphorothioate
  modified_base 2: mod_base = OTHER; note = 2'-O-methyl-cytidine-3'-phosphorothioate
  modified_base 3: mod_base = OTHER; note = 2'-O-methyl-uridine-3'-phosphate
  modified_base 4: mod_base = OTHER; note = 2'-O-methyl-uridine-3'-phosphate
  modified_base 5: mod_base = OTHER; note = 2'-deoxy-2'-fluoro-guanosine-3'-phosphate
  modified_base 6: mod_base = OTHER; note = 2'-O-methyl-uridine-3'-phosphate
  modified_base 7: mod_base = OTHER; note = 2'-deoxy-2'-fluoro-uridine-3'-phosphate
  modified_base 8: mod_base = OTHER; note = 2'-deoxy-2'-fluoro-guanosine-3'-phosphate
  modified_base 9: mod_base = OTHER; note = 2'-deoxy-2'-fluoro-guanosine-3'-phosphate
  modified_base 10: mod_base = OTHER; note = 2'-O-methyl-cytidine-3'-phosphate
  modified_base 11: mod_base = OTHER; note = 2'-O-methyl-cytidine-3'-phosphate
  modified_base 12: mod_base = OTHER; note = 2'-O-methyl-cytidine-3'-phosphate
  modified_base 13: mod_base = OTHER; note = 2'-O-methyl-adenosine-3'-phosphate
  modified_base 14: mod_base = OTHER; note = 2'-O-methyl-uridine-3'-phosphate
  modified_base 15: mod_base = OTHER; note = 2'-O-methyl-cytidine-3'-phosphate
  modified_base 16: mod_base = OTHER; note = 2'-O-methyl-uridine-3'-phosphate
  modified_base 17: mod_base = OTHER; note = 2'-O-methyl-adenosine-3'-phosphate
  modified_base 18: mod_base = OTHER; note = 2'-O-methyl-uridine-3'-phosphate
  modified_base 19: mod_base = OTHER; note = 2'-O-methyl-adenosine-3'-phosphate
acttgttggcccatctata

SEQ ID NO: 1809 - RNA, 19 nt, synthetic construct
  source 1..19: mol_type = other RNA
  modified_base 1: mod_base = OTHER; note = 2'-O-methyl-uridine-3'-phosphorothioate
  modified_base 2: mod_base = OTHER; note = 2'-O-methyl-uridine-3'-phosphorothioate
  modified_base 3: mod_base = OTHER; note = 2'-O-methyl-guanosine-3'-phosphate
  modified_base 4: mod_base = OTHER; note = 2'-O-methyl-uridine-3'-phosphate
  modified_base 5: mod_base = OTHER; note = 2'-deoxy-2'-fluoro-uridine-3'-phosphate
  modified_base 6: mod_base = OTHER; note = 2'-O-methyl-guanosine-3'-phosphate
  modified_base 7: mod_base = OTHER; note = 2'-deoxy-2'-fluoro-guanosine-3'-phosphate
  modified_base 8: mod_base = OTHER; note = 2'-deoxy-2'-fluoro-cytidine-3'-phosphate
  modified_base 9: mod_base = OTHER; note = 2'-deoxy-2'-fluoro-cytidine-3'-phosphate
  modified_base 10: mod_base = OTHER; note = 2'-O-methyl-cytidine-3'-phosphate
  modified_base 11: mod_base = OTHER; note = 2'-O-methyl-adenosine-3'-phosphate
  modified_base 12: mod_base = OTHER; note = 2'-O-methyl-uridine-3'-phosphate
  modified_base 13: mod_base = OTHER; note = 2'-O-methyl-cytidine-3'-phosphate
  modified_base 14: mod_base = OTHER; note = 2'-O-methyl-uridine-3'-phosphate
  modified_base 15: mod_base = OTHER; note = 2'-O-methyl-adenosine-3'-phosphate
  modified_base 16: mod_base = OTHER; note = 2'-O-methyl-uridine-3'-phosphate
  modified_base 17: mod_base = OTHER; note = 2'-O-methyl-uridine-3'-phosphate
  modified_base 18: mod_base = OTHER; note = 2'-O-methyl-adenosine-3'-phosphate
  modified_base 19: mod_base = OTHER; note = 2'-O-methyl-adenosine-3'-phosphate
ttgttggcccatctattaa

SEQ ID NO: 1810 - RNA, 19 nt, synthetic construct
  source 1..19: mol_type = other RNA
  modified_base 1: mod_base = OTHER; note = 2'-O-methyl-uridine-3'-phosphorothioate
  modified_base 2: mod_base = OTHER; note = 2'-O-methyl-uridine-3'-phosphorothioate
  modified_base 3: mod_base = OTHER; note = 2'-O-methyl-guanosine-3'-phosphate
  modified_base 4: mod_base = OTHER; note = 2'-O-methyl-guanosine-3'-phosphate
  modified_base 5: mod_base = OTHER; note = 2'-deoxy-2'-fluoro-cytidine-3'-phosphate
  modified_base 6: mod_base = OTHER; note = 2'-O-methyl-cytidine-3'-phosphate
  modified_base 7: mod_base = OTHER; note = 2'-deoxy-2'-fluoro-cytidine-3'-phosphate
  modified_base 8: mod_base = OTHER; note = 2'-deoxy-2'-fluoro-adenosine-3'-phosphate
  modified_base 9: mod_base = OTHER; note = 2'-deoxy-2'-fluoro-uridine-3'-phosphate
  modified_base 10: mod_base = OTHER; note = 2'-O-methyl-cytidine-3'-phosphate
  modified_base 11: mod_base = OTHER; note = 2'-O-methyl-uridine-3'-phosphate
  modified_base 12: mod_base = OTHER; note = 2'-O-methyl-adenosine-3'-phosphate
  modified_base 13: mod_base = OTHER; note = 2'-O-methyl-uridine-3'-phosphate
  modified_base 14: mod_base = OTHER; note = 2'-O-methyl-uridine-3'-phosphate
  modified_base 15: mod_base = OTHER; note = 2'-O-methyl-adenosine-3'-phosphate
  modified_base 16: mod_base = OTHER; note = 2'-O-methyl-cytidine-3'-phosphate
  modified_base 17: mod_base = OTHER; note = 2'-O-methyl-adenosine-3'-phosphate
  modified_base 18: mod_base = OTHER; note = 2'-O-methyl-uridine-3'-phosphate
  modified_base 19: mod_base = OTHER; note = 2'-O-methyl-adenosine-3'-phosphate
ttggcccatctattacata

SEQ ID NO: 1811 - RNA, 19 nt, synthetic construct
  source 1..19: mol_type = other RNA
  modified_base 1: mod_base = OTHER; note = 2'-O-methyl-cytidine-3'-phosphorothioate
  modified_base 2: mod_base = OTHER; note = 2'-O-methyl-cytidine-3'-phosphorothioate
  modified_base 3: mod_base = OTHER; note = 2'-O-methyl-cytidine-3'-phosphate
  modified_base 4: mod_base = OTHER; note = 2'-O-methyl-adenosine-3'-phosphate
  modified_base 5: mod_base = OTHER; note = 2'-deoxy-2'-fluoro-uridine-3'-phosphate
  modified_base 6: mod_base = OTHER; note = 2'-O-methyl-cytidine-3'-phosphate
  modified_base 7: mod_base = OTHER; note = 2'-deoxy-2'-fluoro-uridine-3'-phosphate
  modified_base 8: mod_base = OTHER; note = 2'-deoxy-2'-fluoro-adenosine-3'-phosphate
  modified_base 9: mod_base = OTHER; note = 2'-deoxy-2'-fluoro-uridine-3'-phosphate
  modified_base 10: mod_base = OTHER; note = 2'-O-methyl-uridine-3'-phosphate
  modified_base 11: mod_base = OTHER; note = 2'-O-methyl-adenosine-3'-phosphate
  modified_base 12: mod_base = OTHER; note = 2'-O-methyl-cytidine-3'-phosphate
  modified_base 13: mod_base = OTHER; note = 2'-O-methyl-adenosine-3'-phosphate
  modified_base 14: mod_base = OTHER; note = 2'-O-methyl-uridine-3'-phosphate
  modified_base 15: mod_base = OTHER; note = 2'-O-methyl-cytidine-3'-phosphate
  modified_base 16: mod_base = OTHER; note = 2'-O-methyl-uridine-3'-phosphate
  modified_base 17: mod_base = OTHER; note = 2'-O-methyl-adenosine-3'-phosphate
  modified_base 18: mod_base = OTHER; note = 2'-O-methyl-cytidine-3'-phosphate
  modified_base 19: mod_base = OTHER; note = 2'-O-methyl-adenosine-3'-phosphate
cccatctattacatctaca

SEQ ID NO: 1812 - RNA, 19 nt, synthetic construct
  source 1..19: mol_type = other RNA
  modified_base 1: mod_base = OTHER; note = 2'-O-methyl-cytidine-3'-phosphorothioate
  modified_base 2: mod_base = OTHER; note = 2'-O-methyl-cytidine-3'-phosphorothioate
  modified_base 3: mod_base = OTHER; note = 2'-O-methyl-adenosine-3'-phosphate
  modified_base 4: mod_base = OTHER; note = 2'-O-methyl-uridine-3'-phosphate
  modified_base 5: mod_base = OTHER; note = 2'-deoxy-2'-fluoro-cytidine-3'-phosphate
  modified_base 6: mod_base = OTHER; note = 2'-O-methyl-uridine-3'-phosphate
  modified_base 7: mod_base = OTHER; note = 2'-deoxy-2'-fluoro-adenosine-3'-phosphate
  modified_base 8: mod_base = OTHER; note = 2'-deoxy-2'-fluoro-uridine-3'-phosphate
  modified_base 9: mod_base = OTHER; note = 2'-deoxy-2'-fluoro-uridine-3'-phosphate
  modified_base 10: mod_base = OTHER; note = 2'-O-methyl-adenosine-3'-phosphate
  modified_base 11: mod_base = OTHER; note = 2'-O-methyl-cytidine-3'-phosphate
  modified_base 12: mod_base = OTHER; note = 2'-O-methyl-adenosine-3'-phosphate
  modified_base 13: mod_base = OTHER; note = 2'-O-methyl-uridine-3'-phosphate
  modified_base 14: mod_base = OTHER; note = 2'-O-methyl-cytidine-3'-phosphate
  modified_base 15: mod_base = OTHER; note = 2'-O-methyl-uridine-3'-phosphate
  modified_base 16: mod_base = OTHER; note = 2'-O-methyl-adenosine-3'-phosphate
  modified_base 17: mod_base = OTHER; note = 2'-O-methyl-cytidine-3'-phosphate
  modified_base 18: mod_base = OTHER; note = 2'-O-methyl-adenosine-3'-phosphate
  modified_base 19: mod_base = OTHER; note = 2'-O-methyl-adenosine-3'-phosphate
ccatctattacatctacaa

SEQ ID NO: 1813 - RNA, 19 nt, synthetic construct
  source 1..19: mol_type = other RNA
  modified_base 1: mod_base = OTHER; note = 2'-O-methyl-cytidine-3'-phosphorothioate
  modified_base 2: mod_base = OTHER; note = 2'-O-methyl-adenosine-3'-phosphorothioate
  modified_base 3: mod_base = OTHER; note = 2'-O-methyl-uridine-3'-phosphate
  modified_base 4: mod_base = OTHER; note = 2'-O-methyl-cytidine-3'-phosphate
  modified_base 5: mod_base = OTHER; note = 2'-deoxy-2'-fluoro-uridine-3'-phosphate
  modified_base 6: mod_base = OTHER; note = 2'-O-methyl-adenosine-3'-phosphate
  modified_base 7: mod_base = OTHER; note = 2'-deoxy-2'-fluoro-uridine-3'-phosphate
  modified_base 8: mod_base = OTHER; note = 2'-deoxy-2'-fluoro-uridine-3'-phosphate
  modified_base 9: mod_base = OTHER; note = 2'-deoxy-2'-fluoro-adenosine-3'-phosphate
  modified_base 10: mod_base = OTHER; note = 2'-O-methyl-cytidine-3'-phosphate
  modified_base 11: mod_base = OTHER; note = 2'-O-methyl-adenosine-3'-phosphate
  modified_base 12: mod_base = OTHER; note = 2'-O-methyl-uridine-3'-phosphate
  modified_base 13: mod_base = OTHER; note = 2'-O-methyl-cytidine-3'-phosphate
  modified_base 14: mod_base = OTHER; note = 2'-O-methyl-uridine-3'-phosphate
  modified_base 15: mod_base = OTHER; note = 2'-O-methyl-adenosine-3'-phosphate
  modified_base 16: mod_base = OTHER; note = 2'-O-methyl-cytidine-3'-phosphate
  modified_base 17: mod_base = OTHER; note = 2'-O-methyl-adenosine-3'-phosphate
  modified_base 18: mod_base = OTHER; note = 2'-O-methyl-guanosine-3'-phosphate
  modified_base 19: mod_base = OTHER; note = 2'-O-methyl-adenosine-3'-phosphate
catctattacatctacaga

SEQ ID NO: 1814 - RNA, 19 nt, synthetic construct
  source 1..19: mol_type = other RNA
  modified_base 1: mod_base = OTHER; note = 2'-O-methyl-adenosine-3'-phosphorothioate
  modified_base 2: mod_base = OTHER; note = 2'-O-methyl-uridine-3'-phosphorothioate
  modified_base 3: mod_base = OTHER; note = 2'-O-methyl-cytidine-3'-phosphate
  modified_base 4: mod_base = OTHER; note = 2'-O-methyl-uridine-3'-phosphate
  modified_base 5: mod_base = OTHER; note = 2'-deoxy-2'-fluoro-adenosine-3'-phosphate
  modified_base 6: mod_base = OTHER; note = 2'-O-methyl-uridine-3'-phosphate
  modified_base 7: mod_base = OTHER; note = 2'-deoxy-2'-fluoro-uridine-3'-phosphate
  modified_base 8: mod_base = OTHER; note = 2'-deoxy-2'-fluoro-adenosine-3'-phosphate
  modified_base 9: mod_base = OTHER; note = 2'-deoxy-2'-fluoro-cytidine-3'-phosphate
  modified_base 10: mod_base = OTHER; note = 2'-O-methyl-adenosine-3'-phosphate
  modified_base 11: mod_base = OTHER; note = 2'-O-methyl-uridine-3'-phosphate
  modified_base 12: mod_base = OTHER; note = 2'-O-methyl-cytidine-3'-phosphate
  modified_base 13: mod_base = OTHER; note = 2'-O-methyl-uridine-3'-phosphate
  modified_base 14: mod_base = OTHER; note = 2'-O-methyl-adenosine-3'-phosphate
  modified_base 15: mod_base = OTHER; note = 2'-O-methyl-cytidine-3'-phosphate
  modified_base 16: mod_base = OTHER; note = 2'-O-methyl-adenosine-3'-phosphate
  modified_base 17: mod_base = OTHER; note = 2'-O-methyl-guanosine-3'-phosphate
  modified_base 18: mod_base = OTHER; note = 2'-O-methyl-cytidine-3'-phosphate
  modified_base 19: mod_base = OTHER; note = 2'-O-methyl-adenosine-3'-phosphate
atctattacatctacagca

SEQ ID NO: 1815 - RNA, 19 nt, synthetic construct
  source 1..19: mol_type = other RNA
  modified_base 1: mod_base = OTHER; note = 2'-O-methyl-uridine-3'-phosphorothioate
  modified_base 2: mod_base = OTHER; note = 2'-O-methyl-cytidine-3'-phosphorothioate
  modified_base 3: mod_base = OTHER; note = 2'-O-methyl-uridine-3'-phosphate
  modified_base 4: mod_base = OTHER; note = 2'-O-methyl-adenosine-3'-phosphate
  modified_base 5: mod_base = OTHER; note = 2'-deoxy-2'-fluoro-uridine-3'-phosphate
  modified_base 6: mod_base = OTHER; note = 2'-O-methyl-uridine-3'-phosphate
  modified_base 7: mod_base = OTHER; note = 2'-deoxy-2'-fluoro-adenosine-3'-phosphate
  modified_base 8: mod_base = OTHER; note = 2'-deoxy-2'-fluoro-cytidine-3'-phosphate
  modified_base 9: mod_base = OTHER; note = 2'-deoxy-2'-fluoro-adenosine-3'-phosphate
  modified_base 10: mod_base = OTHER; note = 2'-O-methyl-uridine-3'-phosphate
  modified_base 11: mod_base = OTHER; note = 2'-O-methyl-cytidine-3'-phosphate
  modified_base 12: mod_base = OTHER; note = 2'-O-methyl-uridine-3'-phosphate
  modified_base 13: mod_base = OTHER; note = 2'-O-methyl-adenosine-3'-phosphate
  modified_base 14: mod_base = OTHER; note = 2'-O-methyl-cytidine-3'-phosphate
  modified_base 15: mod_base = OTHER; note = 2'-O-methyl-adenosine-3'-phosphate
  modified_base 16: mod_base = OTHER; note = 2'-O-methyl-guanosine-3'-phosphate
  modified_base 17: mod_base = OTHER; note = 2'-O-methyl-cytidine-3'-phosphate
  modified_base 18: mod_base = OTHER; note = 2'-O-methyl-uridine-3'-phosphate
  modified_base 19: mod_base = OTHER; note = 2'-O-methyl-adenosine-3'-phosphate
tctattacatctacagcta

SEQ ID NO: 1816 - RNA, 19 nt, synthetic construct
  source 1..19: mol_type = other RNA
  modified_base 1: mod_base = OTHER; note = 2'-O-methyl-cytidine-3'-phosphorothioate
  modified_base 2: mod_base = OTHER; note = 2'-O-methyl-uridine-3'-phosphorothioate
  modified_base 3: mod_base = OTHER; note = 2'-O-methyl-adenosine-3'-phosphate
  modified_base 4: mod_base = OTHER; note = 2'-O-methyl-uridine-3'-phosphate
  modified_base 5: mod_base = OTHER; note = 2'-deoxy-2'-fluoro-uridine-3'-phosphate
  modified_base 6: mod_base = OTHER; note = 2'-O-methyl-adenosine-3'-phosphate
  modified_base 7: mod_base = OTHER; note = 2'-deoxy-2'-fluoro-cytidine-3'-phosphate
  modified_base 8: mod_base = OTHER; note = 2'-deoxy-2'-fluoro-adenosine-3'-phosphate
  modified_base 9: mod_base = OTHER; note = 2'-deoxy-2'-fluoro-uridine-3'-phosphate
  modified_base 10: mod_base = OTHER; note = 2'-O-methyl-cytidine-3'-phosphate
  modified_base 11: mod_base = OTHER; note = 2'-O-methyl-uridine-3'-phosphate
  modified_base 12: mod_base = OTHER; note = 2'-O-methyl-adenosine-3'-phosphate
  modified_base 13: mod_base = OTHER; note = 2'-O-methyl-cytidine-3'-phosphate
  modified_base 14: mod_base = OTHER; note = 2'-O-methyl-adenosine-3'-phosphate
  modified_base 15: mod_base = OTHER; note = 2'-O-methyl-guanosine-3'-phosphate
  modified_base 16: mod_base = OTHER; note = 2'-O-methyl-cytidine-3'-phosphate
  modified_base 17: mod_base = OTHER; note = 2'-O-methyl-uridine-3'-phosphate
  modified_base 18: mod_base = OTHER; note = 2'-O-methyl-guanosine-3'-phosphate
  modified_base 19: mod_base = OTHER; note = 2'-O-methyl-adenosine-3'-phosphate
ctattacatctacagctga

SEQ ID NO: 1817 - RNA, 19 nt, synthetic construct
  source 1..19: mol_type = other RNA
  modified_base 1: mod_base = OTHER; note = 2'-O-methyl-uridine-3'-phosphorothioate
  modified_base 2: mod_base = OTHER; note = 2'-O-methyl-adenosine-3'-phosphorothioate
  modified_base 3: mod_base = OTHER; note = 2'-O-methyl-uridine-3'-phosphate
  modified_base 4: mod_base = OTHER; note = 2'-O-methyl-uridine-3'-phosphate
  modified_base 5: mod_base = OTHER; note = 2'-deoxy-2'-fluoro-adenosine-3'-phosphate
  modified_base 6: mod_base = OTHER; note = 2'-O-methyl-cytidine-3'-phosphate
  modified_base 7: mod_base = OTHER; note = 2'-deoxy-2'-fluoro-adenosine-3'-phosphate
  modified_base 8: mod_base = OTHER; note = 2'-deoxy-2'-fluoro-uridine-3'-phosphate
  modified_base 9: mod_base = OTHER; note = 2'-deoxy-2'-fluoro-cytidine-3'-phosphate
  modified_base 10: mod_base = OTHER; note = 2'-O-methyl-uridine-3'-phosphate
  modified_base 11: mod_base = OTHER; note = 2'-O-methyl-adenosine-3'-phosphate
  modified_base 12: mod_base = OTHER; note = 2'-O-methyl-cytidine-3'-phosphate
  modified_base 13: mod_base = OTHER; note = 2'-O-methyl-adenosine-3'-phosphate
  modified_base 14: mod_base = OTHER; note = 2'-O-methyl-guanosine-3'-phosphate
  modified_base 15: mod_base = OTHER; note = 2'-O-methyl-cytidine-3'-phosphate
  modified_base 16: mod_base = OTHER; note = 2'-O-methyl-uridine-3'-phosphate
  modified_base 17: mod_base = OTHER; note = 2'-O-methyl-guanosine-3'-phosphate
  modified_base 18: mod_base = OTHER; note = 2'-O-methyl-adenosine-3'-phosphate
  modified_base 19: mod_base = OTHER; note = 2'-O-methyl-adenosine-3'-phosphate
tattacatctacagctgaa

SEQ ID NO: 1818 - RNA, 19 nt, synthetic construct
  source 1..19: mol_type = other RNA
  modified_base 1: mod_base = OTHER; note = 2'-O-methyl-adenosine-3'-phosphorothioate
  modified_base 2: mod_base = OTHER; note = 2'-O-methyl-uridine-3'-phosphorothioate
  modified_base 3: mod_base = OTHER; note = 2'-O-methyl-uridine-3'-phosphate
  modified_base 4: mod_base = OTHER; note = 2'-O-methyl-adenosine-3'-phosphate
  modified_base 5: mod_base = OTHER; note = 2'-deoxy-2'-fluoro-cytidine-3'-phosphate
  modified_base 6: mod_base = OTHER; note = 2'-O-methyl-adenosine-3'-phosphate
  modified_base 7: mod_base = OTHER; note = 2'-deoxy-2'-fluoro-uridine-3'-phosphate
  modified_base 8: mod_base = OTHER; note = 2'-deoxy-2'-fluoro-cytidine-3'-phosphate
  modified_base 9: mod_base = OTHER; note = 2'-deoxy-2'-fluoro-uridine-3'-phosphate
  modified_base 10: mod_base = OTHER; note = 2'-O-methyl-adenosine-3'-phosphate
  modified_base 11: mod_base = OTHER; note = 2'-O-methyl-cytidine-3'-phosphate
  modified_base 12: mod_base = OTHER; note = 2'-O-methyl-adenosine-3'-phosphate
  modified_base 13: mod_base = OTHER; note = 2'-O-methyl-guanosine-3'-phosphate
  modified_base 14: mod_base = OTHER; note = 2'-O-methyl-cytidine-3'-phosphate
  modified_base 15: mod_base = OTHER; note = 2'-O-methyl-uridine-3'-phosphate
  modified_base 16: mod_base = OTHER; note = 2'-O-methyl-guanosine-3'-phosphate
  modified_base 17: mod_base = OTHER; note = 2'-O-methyl-adenosine-3'-phosphate
  modified_base 18: mod_base = OTHER; note = 2'-O-methyl-cytidine-3'-phosphate
  modified_base 19: mod_base = OTHER; note = 2'-O-methyl-adenosine-3'-phosphate
attacatctacagctgaca

SEQ ID NO: 1819 - RNA, 19 nt, synthetic construct
  source 1..19: mol_type = other RNA
  modified_base 1: mod_base = OTHER; note = 2'-O-methyl-uridine-3'-phosphorothioate
  modified_base 2: mod_base = OTHER; note = 2'-O-methyl-uridine-3'-phosphorothioate
  modified_base 3: mod_base = OTHER; note = 2'-O-methyl-adenosine-3'-phosphate
  modified_base 4: mod_base = OTHER; note = 2'-O-methyl-cytidine-3'-phosphate
  modified_base 5: mod_base = OTHER; note = 2'-deoxy-2'-fluoro-adenosine-3'-phosphate
  modified_base 6: mod_base = OTHER; note = 2'-O-methyl-uridine-3'-phosphate
  modified_base 7: mod_base = OTHER; note = 2'-deoxy-2'-fluoro-cytidine-3'-phosphate
  modified_base 8: mod_base = OTHER; note = 2'-deoxy-2'-fluoro-uridine-3'-phosphate
  modified_base 9: mod_base = OTHER; note = 2'-deoxy-2'-fluoro-adenosine-3'-phosphate
  modified_base 10: mod_base = OTHER; note = 2'-O-methyl-cytidine-3'-phosphate
  modified_base 11: mod_base = OTHER; note = 2'-O-methyl-adenosine-3'-phosphate
  modified_base 12: mod_base = OTHER; note = 2'-O-methyl-guanosine-3'-phosphate
  modified_base 13: mod_base = OTHER; note = 2'-O-methyl-cytidine-3'-phosphate
  modified_base 14: mod_base = OTHER; note = 2'-O-methyl-uridine-3'-phosphate
  modified_base 15: mod_base = OTHER; note = 2'-O-methyl-guanosine-3'-phosphate
  modified_base 16: mod_base = OTHER; note = 2'-O-methyl-adenosine-3'-phosphate
  modified_base 17: mod_base = OTHER; note = 2'-O-methyl-cytidine-3'-phosphate
  modified_base 18: mod_base = OTHER; note = 2'-O-methyl-cytidine-3'-phosphate
  modified_base 19: mod_base = OTHER; note = 2'-O-methyl-adenosine-3'-phosphate
ttacatctacagctgacca

SEQ ID NO: 1820 - RNA, 19 nt, synthetic construct
  source 1..19: mol_type = other RNA
  modified_base 1: mod_base = OTHER; note = 2'-O-methyl-uridine-3'-phosphorothioate
  modified_base 2: mod_base = OTHER; note = 2'-O-methyl-adenosine-3'-phosphorothioate
  modified_base 3: mod_base = OTHER; note = 2'-O-methyl-cytidine-3'-phosphate
  modified_base 4: mod_base = OTHER; note = 2'-O-methyl-adenosine-3'-phosphate
  modified_base 5: mod_base = OTHER; note = 2'-deoxy-2'-fluoro-uridine-3'-phosphate
  modified_base 6: mod_base = OTHER; note = 2'-O-methyl-cytidine-3'-phosphate
  modified_base 7: mod_base = OTHER; note = 2'-deoxy-2'-fluoro-uridine-3'-phosphate
  modified_base 8: mod_base = OTHER; note = 2'-deoxy-2'-fluoro-adenosine-3'-phosphate
  modified_base 9: mod_base = OTHER; note = 2'-deoxy-2'-fluoro-cytidine-3'-phosphate
  modified_base 10: mod_base = OTHER; note = 2'-O-methyl-adenosine-3'-phosphate
  modified_base 11: mod_base = OTHER; note = 2'-O-methyl-guanosine-3'-phosphate
  modified_base 12: mod_base = OTHER; note = 2'-O-methyl-cytidine-3'-phosphate
  modified_base 13: mod_base = OTHER; note = 2'-O-methyl-uridine-3'-phosphate
  modified_base 14: mod_base = OTHER; note = 2'-O-methyl-guanosine-3'-phosphate
  modified_base 15: mod_base = OTHER; note = 2'-O-methyl-adenosine-3'-phosphate
  modified_base 16: mod_base = OTHER; note = 2'-O-methyl-cytidine-3'-phosphate
  modified_base 17: mod_base = OTHER; note = 2'-O-methyl-cytidine-3'-phosphate
  modified_base 18: mod_base = OTHER; note = 2'-O-methyl-cytidine-3'-phosphate
  modified_base 19: mod_base = OTHER; note = 2'-O-methyl-adenosine-3'-phosphate
tacatctacagctgaccca

SEQ ID NO: 1821 - RNA, 19 nt, synthetic construct
  source 1..19: mol_type = other RNA
  modified_base 1: mod_base = OTHER; note = 2'-O-methyl-adenosine-3'-phosphorothioate
  modified_base 2: mod_base = OTHER; note = 2'-O-methyl-cytidine-3'-phosphorothioate
  modified_base 3: mod_base = OTHER; note = 2'-O-methyl-adenosine-3'-phosphate
  modified_base 4: mod_base = OTHER; note = 2'-O-methyl-uridine-3'-phosphate
  modified_base 5: mod_base = OTHER; note = 2'-deoxy-2'-fluoro-cytidine-3'-phosphate
  modified_base 6: mod_base = OTHER; note = 2'-O-methyl-uridine-3'-phosphate
  modified_base 7: mod_base = OTHER; note = 2'-deoxy-2'-fluoro-adenosine-3'-phosphate
  modified_base 8: mod_base = OTHER; note = 2'-deoxy-2'-fluoro-cytidine-3'-phosphate
  modified_base 9: mod_base = OTHER; note = 2'-deoxy-2'-fluoro-adenosine-3'-phosphate
  modified_base 10: mod_base = OTHER; note = 2'-O-methyl-guanosine-3'-phosphate
  modified_base 11: mod_base = OTHER; note = 2'-O-methyl-cytidine-3'-phosphate
  modified_base 12: mod_base = OTHER; note = 2'-O-methyl-uridine-3'-phosphate
  modified_base 13: mod_base = OTHER; note = 2'-O-methyl-guanosine-3'-phosphate
  modified_base 14: mod_base = OTHER; note = 2'-O-methyl-adenosine-3'-phosphate
  modified_base 15: mod_base = OTHER; note = 2'-O-methyl-cytidine-3'-phosphate
  modified_base 16: mod_base = OTHER; note = 2'-O-methyl-cytidine-3'-phosphate
  modified_base 17: mod_base = OTHER; note = 2'-O-methyl-cytidine-3'-phosphate
  modified_base 18: mod_base = OTHER; note = 2'-O-methyl-uridine-3'-phosphate
  modified_base 19: mod_base = OTHER; note = 2'-O-methyl-adenosine-3'-phosphate
acatctacagctgacccta

SEQ ID NO: 1822 - RNA, 19 nt, synthetic construct
  source 1..19: mol_type = other RNA
  modified_base 1: mod_base = OTHER; note = 2'-O-methyl-cytidine-3'-phosphorothioate
  modified_base 2: mod_base = OTHER; note = 2'-O-methyl-adenosine-3'-phosphorothioate
  modified_base 3: mod_base = OTHER; note = 2'-O-methyl-uridine-3'-phosphate
  modified_base 4: mod_base = OTHER; note = 2'-O-methyl-cytidine-3'-phosphate
  modified_base 5: mod_base = OTHER; note = 2'-deoxy-2'-fluoro-uridine-3'-phosphate
  modified_base 6: mod_base = OTHER; note = 2'-O-methyl-adenosine-3'-phosphate
  modified_base 7: mod_base = OTHER; note = 2'-deoxy-2'-fluoro-cytidine-3'-phosphate
  modified_base 8: mod_base = OTHER; note = 2'-deoxy-2'-fluoro-adenosine-3'-phosphate
  modified_base 9: mod_base = OTHER; note = 2'-deoxy-2'-fluoro-guanosine-3'-phosphate
  modified_base 10: mod_base = OTHER; note = 2'-O-methyl-cytidine-3'-phosphate
  modified_base 11: mod_base = OTHER; note = 2'-O-methyl-uridine-3'-phosphate
  modified_base 12: mod_base = OTHER; note = 2'-O-methyl-guanosine-3'-phosphate
  modified_base 13: mod_base = OTHER; note = 2'-O-methyl-adenosine-3'-phosphate
  modified_base 14: mod_base = OTHER; note = 2'-O-methyl-cytidine-3'-phosphate
  modified_base 15: mod_base = OTHER; note = 2'-O-methyl-cytidine-3'-phosphate
  modified_base 16: mod_base = OTHER; note = 2'-O-methyl-cytidine-3'-phosphate
  modified_base 17: mod_base = OTHER; note = 2'-O-methyl-uridine-3'-phosphate
  modified_base 18: mod_base = OTHER; note = 2'-O-methyl-uridine-3'-phosphate
  modified_base 19: mod_base = OTHER; note = 2'-O-methyl-adenosine-3'-phosphate
catctacagctgaccctta

SEQ ID NO: 1823 - RNA, 19 nt, synthetic construct
  source 1..19: mol_type = other RNA
  modified_base 1: mod_base = OTHER; note = 2'-O-methyl-adenosine-3'-phosphorothioate
  modified_base 2: mod_base = OTHER; note = 2'-O-methyl-uridine-3'-phosphorothioate
  modified_base 3: mod_base = OTHER; note = 2'-O-methyl-cytidine-3'-phosphate
  modified_base 4: mod_base = OTHER; note = 2'-O-methyl-uridine-3'-phosphate
  modified_base 5: mod_base = OTHER; note = 2'-deoxy-2'-fluoro-adenosine-3'-phosphate
  modified_base 6: mod_base = OTHER; note = 2'-O-methyl-cytidine-3'-phosphate
  modified_base 7: mod_base = OTHER; note = 2'-deoxy-2'-fluoro-adenosine-3'-phosphate
  modified_base 8: mod_base = OTHER; note = 2'-deoxy-2'-fluoro-guanosine-3'-phosphate
  modified_base 9: mod_base = OTHER; note = 2'-deoxy-2'-fluoro-cytidine-3'-phosphate
  modified_base 10: mod_base = OTHER; note = 2'-O-methyl-uridine-3'-phosphate
  modified_base 11: mod_base = OTHER; note = 2'-O-methyl-guanosine-3'-phosphate
  modified_base 12: mod_base = OTHER; note = 2'-O-methyl-adenosine-3'-phosphate
  modified_base 13: mod_base = OTHER; note = 2'-O-methyl-cytidine-3'-phosphate
  modified_base 14: mod_base = OTHER; note = 2'-O-methyl-cytidine-3'-phosphate
  modified_base 15: mod_base = OTHER; note = 2'-O-methyl-cytidine-3'-phosphate
  modified_base 16: mod_base = OTHER; note = 2'-O-methyl-uridine-3'-phosphate
  modified_base 17: mod_base = OTHER; note = 2'-O-methyl-uridine-3'-phosphate
  modified_base 18: mod_base = OTHER; note = 2'-O-methyl-guanosine-3'-phosphate
  modified_base 19: mod_base = OTHER; note = 2'-O-methyl-adenosine-3'-phosphate
atctacagctgacccttga

SEQ ID NO: 1824 - RNA, 19 nt, synthetic construct
  source 1..19: mol_type = other RNA
  modified_base 1: mod_base = OTHER; note = 2'-O-methyl-guanosine-3'-phosphorothioate
  modified_base 2: mod_base = OTHER; note = 2'-O-methyl-guanosine-3'-phosphorothioate
  modified_base 3: mod_base = OTHER; note = 2'-O-methyl-guanosine-3'-phosphate
  modified_base 4: mod_base = OTHER; note = 2'-O-methyl-guanosine-3'-phosphate
  modified_base 5: mod_base = OTHER; note = 2'-deoxy-2'-fluoro-uridine-3'-phosphate
  modified_base 6: mod_base = OTHER; note = 2'-O-methyl-uridine-3'-phosphate
  modified_base 7: mod_base = OTHER; note = 2'-deoxy-2'-fluoro-adenosine-3'-phosphate
  modified_base 8: mod_base = OTHER; note = 2'-deoxy-2'-fluoro-guanosine-3'-phosphate
  modified_base 9: mod_base = OTHER; note = 2'-deoxy-2'-fluoro-guanosine-3'-phosphate
  modified_base 10: mod_base = OTHER; note = 2'-O-methyl-guanosine-3'-phosphate
  modified_base 11: mod_base = OTHER; note = 2'-O-methyl-guanosine-3'-phosphate
  modified_base 12: mod_base = OTHER; note = 2'-O-methyl-adenosine-3'-phosphate
  modified_base 13: mod_base = OTHER; note = 2'-O-methyl-guanosine-3'-phosphate
  modified_base 14: mod_base = OTHER; note = 2'-O-methyl-cytidine-3'-phosphate
  modified_base 15: mod_base = OTHER; note = 2'-O-methyl-uridine-3'-phosphate
  modified_base 16: mod_base = OTHER; note = 2'-O-methyl-guanosine-3'-phosphate
  modified_base 17: mod_base = OTHER; note = 2'-O-methyl-adenosine-3'-phosphate
  modified_base 18: mod_base = OTHER; note = 2'-O-methyl-cytidine-3'-phosphate
  modified_base 19: mod_base = OTHER; note = 2'-O-methyl-adenosine-3'-phosphate
ggggttaggggagctgaca

SEQ ID NO: 1825 - RNA, 19 nt, synthetic construct
  source 1..19: mol_type = other RNA
  modified_base 1: mod_base = OTHER; note = 2'-O-methyl-guanosine-3'-phosphorothioate
  modified_base 2: mod_base = OTHER; note = 2'-O-methyl-guanosine-3'-phosphorothioate
  modified_base 3: mod_base = OTHER; note = 2'-O-methyl-guanosine-3'-phosphate
  modified_base 4: mod_base = OTHER; note = 2'-O-methyl-uridine-3'-phosphate
  modified_base 5: mod_base = OTHER; note = 2'-deoxy-2'-fluoro-uridine-3'-phosphate
  modified_base 6: mod_base = OTHER; note = 2'-O-methyl-adenosine-3'-phosphate
  modified_base 7: mod_base = OTHER; note = 2'-deoxy-2'-fluoro-guanosine-3'-phosphate
  modified_base 8: mod_base = OTHER; note = 2'-deoxy-2'-fluoro-guanosine-3'-phosphate
  modified_base 9: mod_base = OTHER; note = 2'-deoxy-2'-fluoro-guanosine-3'-phosphate
  modified_base 10: mod_base = OTHER; note = 2'-O-methyl-guanosine-3'-phosphate
  modified_base 11: mod_base = OTHER; note = 2'-O-methyl-adenosine-3'-phosphate
  modified_base 12: mod_base = OTHER; note = 2'-O-methyl-guanosine-3'-phosphate
  modified_base 13: mod_base = OTHER; note = 2'-O-methyl-cytidine-3'-phosphate
  modified_base 14: mod_base = OTHER; note = 2'-O-methyl-uridine-3'-phosphate
  modified_base 15: mod_base = OTHER; note = 2'-O-methyl-guanosine-3'-phosphate
  modified_base 16: mod_base = OTHER; note = 2'-O-methyl-adenosine-3'-phosphate
  modified_base 17: mod_base = OTHER; note = 2'-O-methyl-cytidine-3'-phosphate
  modified_base 18: mod_base = OTHER; note = 2'-O-methyl-adenosine-3'-phosphate
  modified_base 19: mod_base = OTHER; note = 2'-O-methyl-adenosine-3'-phosphate
gggttaggggagctgacaa

SEQ ID NO: 1826 - RNA, 19 nt, synthetic construct
  source 1..19: mol_type = other RNA
  modified_base 1: mod_base = OTHER; note = 2'-O-methyl-guanosine-3'-phosphorothioate
  modified_base 2: mod_base = OTHER; note = 2'-O-methyl-guanosine-3'-phosphorothioate
  modified_base 3: mod_base = OTHER; note = 2'-O-methyl-uridine-3'-phosphate
  modified_base 4: mod_base = OTHER; note = 2'-O-methyl-uridine-3'-phosphate
  modified_base 5: mod_base = OTHER; note = 2'-deoxy-2'-fluoro-adenosine-3'-phosphate
  modified_base 6: mod_base = OTHER; note = 2'-O-methyl-guanosine-3'-phosphate
  modified_base 7: mod_base = OTHER; note = 2'-deoxy-2'-fluoro-guanosine-3'-phosphate
  modified_base 8: mod_base = OTHER; note = 2'-deoxy-2'-fluoro-guanosine-3'-phosphate
  modified_base 9: mod_base = OTHER; note = 2'-deoxy-2'-fluoro-guanosine-3'-phosphate
  modified_base 10: mod_base = OTHER; note = 2'-O-methyl-adenosine-3'-phosphate
  modified_base 11: mod_base = OTHER; note = 2'-O-methyl-guanosine-3'-phosphate
  modified_base 12: mod_base = OTHER; note = 2'-O-methyl-cytidine-3'-phosphate
  modified_base 13: mod_base = OTHER; note = 2'-O-methyl-uridine-3'-phosphate
  modified_base 14: mod_base = OTHER; note = 2'-O-methyl-guanosine-3'-phosphate
  modified_base 15: mod_base = OTHER; note = 2'-O-methyl-adenosine-3'-phosphate
  modified_base 16: mod_base = OTHER; note = 2'-O-methyl-cytidine-3'-phosphate
  modified_base 17: mod_base = OTHER; note = 2'-O-methyl-adenosine-3'-phosphate
  modified_base 18: mod_base = OTHER; note = 2'-O-methyl-adenosine-3'-phosphate
  modified_base 19: mod_base = OTHER; note = 2'-O-methyl-adenosine-3'-phosphate
ggttaggggagctgacaaa

SEQ ID NO: 1827 - RNA, 19 nt, synthetic construct
  source 1..19: mol_type = other RNA
  modified_base 1: mod_base = OTHER; note = 2'-O-methyl-guanosine-3'-phosphorothioate
  modified_base 2: mod_base = OTHER; note = 2'-O-methyl-uridine-3'-phosphorothioate
  modified_base 3: mod_base = OTHER; note = 2'-O-methyl-uridine-3'-phosphate
  modified_base 4: mod_base = OTHER; note = 2'-O-methyl-adenosine-3'-phosphate
  modified_base 5: mod_base = OTHER; note = 2'-deoxy-2'-fluoro-guanosine-3'-phosphate
  modified_base 6: mod_base = OTHER; note = 2'-O-methyl-guanosine-3'-phosphate
  modified_base 7: mod_base = OTHER; note = 2'-deoxy-2'-fluoro-guanosine-3'-phosphate
  modified_base 8: mod_base = OTHER; note = 2'-deoxy-2'-fluoro-guanosine-3'-phosphate
  modified_base 9: mod_base = OTHER; note = 2'-deoxy-2'-fluoro-adenosine-3'-phosphate
  modified_base 10: mod_base = OTHER; note = 2'-O-methyl-guanosine-3'-phosphate
  modified_base 11: mod_base = OTHER; note = 2'-O-methyl-cytidine-3'-phosphate
  modified_base 12: mod_base = OTHER; note = 2'-O-methyl-uridine-3'-phosphate
  modified_base 13: mod_base = OTHER; note = 2'-O-methyl-guanosine-3'-phosphate
  modified_base 14: mod_base = OTHER; note = 2'-O-methyl-adenosine-3'-phosphate
  modified_base 15: mod_base = OTHER; note = 2'-O-methyl-cytidine-3'-phosphate
  modified_base 16: mod_base = OTHER; note = 2'-O-methyl-adenosine-3'-phosphate
  modified_base 17: mod_base = OTHER; note = 2'-O-methyl-adenosine-3'-phosphate
  modified_base 18: mod_base = OTHER; note = 2'-O-methyl-uridine-3'-phosphate
  modified_base 19: mod_base = OTHER; note = 2'-O-methyl-adenosine-3'-phosphate
gttaggggagctgacaata

SEQ ID NO: 1828 - RNA, 19 nt, synthetic construct
  source 1..19: mol_type = other RNA
  modified_base 1: mod_base = OTHER; note = 2'-O-methyl-cytidine-3'-phosphorothioate
  modified_base 2: mod_base = OTHER; note = 2'-O-methyl-adenosine-3'-phosphorothioate
  modified_base 3: mod_base = OTHER; note = 2'-O-methyl-adenosine-3'-phosphate
  modified_base 4: mod_base = OTHER; note = 2'-O-methyl-adenosine-3'-phosphate
  modified_base 5: mod_base = OTHER; note = 2'-deoxy-2'-fluoro-adenosine-3'-phosphate
  modified_base 6: mod_base = OTHER; note = 2'-O-methyl-uridine-3'-phosphate
  modified_base 7: mod_base = OTHER; note = 2'-deoxy-2'-fluoro-cytidine-3'-phosphate
  modified_base 8: mod_base = OTHER; note = 2'-deoxy-2'-fluoro-uridine-3'-phosphate
  modified_base 9: mod_base = OTHER; note = 2'-deoxy-2'-fluoro-uridine-3'-phosphate
  modified_base 10: mod_base = OTHER; note = 2'-O-methyl-adenosine-3'-phosphate
  modified_base 11: mod_base = OTHER; note = 2'-O-methyl-adenosine-3'-phosphate
  modified_base 12: mod_base = OTHER; note = 2'-O-methyl-cytidine-3'-phosphate
  modified_base 13: mod_base = OTHER; note = 2'-O-methyl-uridine-3'-phosphate
  modified_base 14: mod_base = OTHER; note = 2'-O-methyl-adenosine-3'-phosphate
  modified_base 15: mod_base = OTHER; note = 2'-O-methyl-cytidine-3'-phosphate
  modified_base 16: mod_base = OTHER; note = 2'-O-methyl-cytidine-3'-phosphate
  modified_base 17: mod_base = OTHER; note = 2'-O-methyl-uridine-3'-phosphate
  modified_base 18: mod_base = OTHER; note = 2'-O-methyl-adenosine-3'-phosphate
  modified_base 19: mod_base = OTHER; note = 2'-O-methyl-adenosine-3'-phosphate
caaaatcttaactacctaa

SEQ ID NO: 1829 - RNA, 19 nt, synthetic construct
  source 1..19: mol_type = other RNA
  modified_base 1: mod_base = OTHER; note = 2'-O-methyl-adenosine-3'-phosphorothioate
  modified_base 2: mod_base = OTHER; note = 2'-O-methyl-adenosine-3'-phosphorothioate
  modified_base 3: mod_base = OTHER; note = 2'-O-methyl-uridine-3'-phosphate
  modified_base 4: mod_base = OTHER; note = 2'-O-methyl-cytidine-3'-phosphate
  modified_base 5: mod_base = OTHER; note = 2'-deoxy-2'-fluoro-uridine-3'-phosphate
  modified_base 6: mod_base = OTHER; note = 2'-O-methyl-uridine-3'-phosphate
  modified_base 7: mod_base = OTHER; note = 2'-deoxy-2'-fluoro-adenosine-3'-phosphate
  modified_base 8: mod_base = OTHER; note = 2'-deoxy-2'-fluoro-adenosine-3'-phosphate
  modified_base 9: mod_base = OTHER; note = 2'-deoxy-2'-fluoro-cytidine-3'-phosphate
  modified_base 10: mod_base = OTHER; note = 2'-O-methyl-uridine-3'-phosphate
  modified_base 11: mod_base = OTHER; note = 2'-O-methyl-adenosine-3'-phosphate
  modified_base 12: mod_base = OTHER; note = 2'-O-methyl-cytidine-3'-phosphate
  modified_base 13: mod_base = OTHER; note = 2'-O-methyl-cytidine-3'-phosphate
  modified_base 14: mod_base = OTHER; note = 2'-O-methyl-uridine-3'-phosphate
  modified_base 15: mod_base = OTHER; note = 2'-O-methyl-adenosine-3'-phosphate
  modified_base 16: mod_base = OTHER; note = 2'-O-methyl-adenosine-3'-phosphate
  modified_base 17: mod_base = OTHER; note = 2'-O-methyl-uridine-3'-phosphate
  modified_base 18: mod_base = OTHER; note = 2'-O-methyl-adenosine-3'-phosphate
  modified_base 19: mod_base = OTHER; note = 2'-O-methyl-adenosine-3'-phosphate
aatcttaactacctaataa

SEQ ID NO: 1830 - RNA, 19 nt, synthetic construct
  source 1..19: mol_type = other RNA
  modified_base 1: mod_base = OTHER; note = 2'-O-methyl-adenosine-3'-phosphorothioate
  modified_base 2: mod_base = OTHER; note = 2'-O-methyl-uridine-3'-phosphorothioate
  modified_base 3: mod_base = OTHER; note = 2'-O-methyl-cytidine-3'-phosphate
  modified_base 4: mod_base = OTHER; note = 2'-O-methyl-uridine-3'-phosphate
  modified_base 5: mod_base = OTHER; note = 2'-deoxy-2'-fluoro-uridine-3'-phosphate
  modified_base 6: mod_base = OTHER; note = 2'-O-methyl-adenosine-3'-phosphate
  modified_base 7: mod_base = OTHER; note = 2'-deoxy-2'-fluoro-adenosine-3'-phosphate
  modified_base 8: mod_base = OTHER; note = 2'-deoxy-2'-fluoro-cytidine-3'-phosphate
  modified_base 9: mod_base = OTHER; note = 2'-deoxy-2'-fluoro-uridine-3'-phosphate
  modified_base 10: mod_base = OTHER; note = 2'-O-methyl-adenosine-3'-phosphate
  modified_base 11: mod_base = OTHER; note = 2'-O-methyl-cytidine-3'-phosphate
  modified_base 12: mod_base = OTHER; note = 2'-O-methyl-cytidine-3'-phosphate
  modified_base 13: mod_base = OTHER; note = 2'-O-methyl-uridine-3'-phosphate
  modified_base 14: mod_base = OTHER; note = 2'-O-methyl-adenosine-3'-phosphate
  modified_base 15: mod_base = OTHER; note = 2'-O-methyl-adenosine-3'-phosphate
  modified_base 16: mod_base = OTHER; note = 2'-O-methyl-uridine-3'-phosphate
  modified_base 17: mod_base = OTHER; note = 2'-O-methyl-adenosine-3'-phosphate
  modified_base 18: mod_base = OTHER; note = 2'-O-methyl-guanosine-3'-phosphate
  modified_base 19: mod_base = OTHER; note = 2'-O-methyl-adenosine-3'-phosphate
atcttaactacctaataga

SEQ ID NO: 1831 - RNA, 19 nt, synthetic construct
  source 1..19: mol_type = other RNA
  modified_base 1: mod_base = OTHER; note = 2'-O-methyl-uridine-3'-phosphorothioate
  modified_base 2: mod_base = OTHER; note = 2'-O-methyl-uridine-3'-phosphorothioate
  modified_base 3: mod_base = OTHER; note = 2'-O-methyl-adenosine-3'-phosphate
  modified_base 4: mod_base = OTHER; note = 2'-O-methyl-adenosine-3'-phosphate
  modified_base 5: mod_base = OTHER; note = 2'-deoxy-2'-fluoro-cytidine-3'-phosphate
  modified_base 6: mod_base = OTHER; note = 2'-O-methyl-uridine-3'-phosphate
  modified_base 7: mod_base = OTHER; note = 2'-deoxy-2'-fluoro-adenosine-3'-phosphate
  modified_base 8: mod_base = OTHER; note = 2'-deoxy-2'-fluoro-cytidine-3'-phosphate
  modified_base 9: mod_base = OTHER; note = 2'-deoxy-2'-fluoro-cytidine-3'-phosphate
  modified_base 10: mod_base = OTHER; note = 2'-O-methyl-uridine-3'-phosphate
  modified_base 11: mod_base = OTHER; note = 2'-O-methyl-adenosine-3'-phosphate
  modified_base 12: mod_base = OTHER; note = 2'-O-methyl-adenosine-3'-phosphate
  modified_base 13: mod_base = OTHER; note = 2'-O-methyl-uridine-3'-phosphate
  modified_base 14: mod_base = OTHER; note = 2'-O-methyl-adenosine-3'-phosphate
  modified_base 15: mod_base = OTHER; note = 2'-O-methyl-guanosine-3'-phosphate
  modified_base 16: mod_base = OTHER; note = 2'-O-methyl-cytidine-3'-phosphate
  modified_base 17: mod_base = OTHER; note = 2'-O-methyl-cytidine-3'-phosphate
  modified_base 18: mod_base = OTHER; note = 2'-O-methyl-uridine-3'-phosphate
  modified_base 19: mod_base = OTHER; note = 2'-O-methyl-adenosine-3'-phosphate
ttaactacctaatagccta

SEQ ID NO: 1832 - RNA, 19 nt, synthetic construct
  source 1..19: mol_type = other RNA
  modified_base 1: mod_base = OTHER; note = 2'-O-methyl-uridine-3'-phosphorothioate
  modified_base 2: mod_base = OTHER; note = 2'-O-methyl-adenosine-3'-phosphorothioate
  modified_base 3: mod_base = OTHER; note = 2'-O-methyl-adenosine-3'-phosphate
  modified_base 4: mod_base = OTHER; note = 2'-O-methyl-cytidine-3'-phosphate
  modified_base 5: mod_base = OTHER; note = 2'-deoxy-2'-fluoro-uridine-3'-phosphate
  modified_base 6: mod_base = OTHER; note = 2'-O-methyl-adenosine-3'-phosphate
  modified_base 7: mod_base = OTHER; note = 2'-deoxy-2'-fluoro-cytidine-3'-phosphate
  modified_base 8: mod_base = OTHER; note = 2'-deoxy-2'-fluoro-cytidine-3'-phosphate
  modified_base 9: mod_base = OTHER; note = 2'-deoxy-2'-fluoro-uridine-3'-phosphate
  modified_base 10: mod_base = OTHER; note = 2'-O-methyl-adenosine-3'-phosphate
  modified_base 11: mod_base = OTHER; note = 2'-O-methyl-adenosine-3'-phosphate
  modified_base 12: mod_base = OTHER; note = 2'-O-methyl-uridine-3'-phosphate
  modified_base 13: mod_base = OTHER; note = 2'-O-methyl-adenosine-3'-phosphate
  modified_base 14: mod_base = OTHER; note = 2'-O-methyl-guanosine-3'-phosphate
  modified_base 15: mod_base = OTHER; note = 2'-O-methyl-cytidine-3'-phosphate
  modified_base 16: mod_base = OTHER; note = 2'-O-methyl-cytidine-3'-phosphate
  modified_base 17: mod_base = OTHER; note = 2'-O-methyl-uridine-3'-phosphate
  modified_base 18: mod_base = OTHER; note = 2'-O-methyl-adenosine-3'-phosphate
  modified_base 19: mod_base = OTHER; note = 2'-O-methyl-adenosine-3'-phosphate
taactacctaatagcctaa

SEQ ID NO: 1833 - RNA, 19 nt, synthetic construct
  source 1..19: mol_type = other RNA
  modified_base 1: mod_base = OTHER; note = 2'-O-methyl-adenosine-3'-phosphorothioate
  modified_base 2: mod_base = OTHER; note = 2'-O-methyl-cytidine-3'-phosphorothioate
  modified_base 3: mod_base = OTHER; note = 2'-O-methyl-uridine-3'-phosphate
  modified_base 4: mod_base = OTHER; note = 2'-O-methyl-adenosine-3'-phosphate
  modified_base 5: mod_base = OTHER; note = 2'-deoxy-2'-fluoro-cytidine-3'-phosphate
  modified_base 6: mod_base = OTHER; note = 2'-O-methyl-cytidine-3'-phosphate
  modified_base 7: mod_base = OTHER; note = 2'-deoxy-2'-fluoro-uridine-3'-phosphate
  modified_base 8: mod_base = OTHER; note = 2'-deoxy-2'-fluoro-adenosine-3'-phosphate
  modified_base 9: mod_base = OTHER; note = 2'-deoxy-2'-fluoro-adenosine-3'-phosphate
  modified_base 10: mod_base = OTHER; note = 2'-O-methyl-uridine-3'-phosphate
  modified_base 11: mod_base = OTHER; note = 2'-O-methyl-adenosine-3'-phosphate
  modified_base 12: mod_base = OTHER; note = 2'-O-methyl-guanosine-3'-phosphate
  modified_base 13: mod_base = OTHER; note = 2'-O-methyl-cytidine-3'-phosphate
  modified_base 14: mod_base = OTHER; note = 2'-O-methyl-cytidine-3'-phosphate
  modified_base 15: mod_base = OTHER; note = 2'-O-methyl-uridine-3'-phosphate
  modified_base 16: mod_base = OTHER; note = 2'-O-methyl-adenosine-3'-phosphate
  modified_base 17: mod_base = OTHER; note = 2'-O-methyl-cytidine-3'-phosphate
  modified_base 18: mod_base = OTHER; note = 2'-O-methyl-uridine-3'-phosphate
  modified_base 19: mod_base = OTHER; note = 2'-O-methyl-adenosine-3'-phosphate
actacctaatagcctacta

SEQ ID NO: 1834 - RNA, 19 nt, synthetic construct
  source 1..19: mol_type = other RNA
  modified_base 1: mod_base = OTHER; note = 2'-O-methyl-adenosine-3'-phosphorothioate
  modified_base 2: mod_base = OTHER; note = 2'-O-methyl-uridine-3'-phosphorothioate
  modified_base 3: mod_base = OTHER; note = 2'-O-methyl-uridine-3'-phosphate
  modified_base 4: mod_base = OTHER; note = 2'-O-methyl-guanosine-3'-phosphate
  modified_base 5: mod_base = OTHER; note = 2'-deoxy-2'-fluoro-adenosine-3'-phosphate
  modified_base 6: mod_base = OTHER; note = 2'-O-methyl-cytidine-3'-phosphate
  modified_base 7: mod_base = OTHER; note = 2'-deoxy-2'-fluoro-cytidine-3'-phosphate
  modified_base 8: mod_base = OTHER; note = 2'-deoxy-2'-fluoro-adenosine-3'-phosphate
  modified_base 9: mod_base = OTHER; note = 2'-deoxy-2'-fluoro-uridine-3'-phosphate
  modified_base 10: mod_base = OTHER; note = 2'-O-methyl-adenosine-3'-phosphate
  modified_base 11: mod_base = OTHER; note = 2'-O-methyl-adenosine-3'-phosphate
  modified_base 12: mod_base = OTHER; note = 2'-O-methyl-adenosine-3'-phosphate
  modified_base 13: mod_base = OTHER; note = 2'-O-methyl-cytidine-3'-phosphate
  modified_base 14: mod_base = OTHER; note = 2'-O-methyl-cytidine-3'-phosphate
  modified_base 15: mod_base = OTHER; note = 2'-O-methyl-uridine-3'-phosphate
  modified_base 16: mod_base = OTHER; note = 2'-O-methyl-uridine-3'-phosphate
  modified_base 17: mod_base = OTHER; note = 2'-O-methyl-adenosine-3'-phosphate
  modified_base 18: mod_base = OTHER; note = 2'-O-methyl-cytidine-3'-phosphate
  modified_base 19: mod_base = OTHER; note = 2'-O-methyl-adenosine-3'-phosphate
attgaccataaaccttaca

SEQ ID NO: 1835 - RNA, 19 nt, synthetic construct
  source 1..19: mol_type = other RNA
  modified_base 1: mod_base = OTHER; note = 2'-O-methyl-uridine-3'-phosphorothioate
  modified_base 2: mod_base = OTHER; note = 2'-O-methyl-uridine-3'-phosphorothioate
  modified_base 3: mod_base = OTHER; note = 2'-O-methyl-guanosine-3'-phosphate
  modified_base 4: mod_base = OTHER; note = 2'-O-methyl-adenosine-3'-phosphate
  modified_base 5: mod_base = OTHER; note = 2'-deoxy-2'-fluoro-cytidine-3'-phosphate
  modified_base 6: mod_base = OTHER; note = 2'-O-methyl-cytidine-3'-phosphate
  modified_base 7: mod_base = OTHER; note = 2'-deoxy-2'-fluoro-adenosine-3'-phosphate
  modified_base 8: mod_base = OTHER; note = 2'-deoxy-2'-fluoro-uridine-3'-phosphate
  modified_base 9: mod_base = OTHER; note = 2'-deoxy-2'-fluoro-adenosine-3'-phosphate
  modified_base 10: mod_base = OTHER; note = 2'-O-methyl-adenosine-3'-phosphate
  modified_base 11: mod_base = OTHER; note = 2'-O-methyl-adenosine-3'-phosphate
  modified_base 12: mod_base = OTHER; note = 2'-O-methyl-cytidine-3'-phosphate
  modified_base 13: mod_base = OTHER; note = 2'-O-methyl-cytidine-3'-phosphate
  modified_base 14: mod_base = OTHER; note = 2'-O-methyl-uridine-3'-phosphate
  modified_base 15: mod_base = OTHER; note = 2'-O-methyl-uridine-3'-phosphate
  modified_base 16: mod_base = OTHER; note = 2'-O-methyl-adenosine-3'-phosphate
  modified_base 17: mod_base = OTHER; note = 2'-O-methyl-cytidine-3'-phosphate
  modified_base 18: mod_base = OTHER; note = 2'-O-methyl-uridine-3'-phosphate
  modified_base 19: mod_base = OTHER; note = 2'-O-methyl-adenosine-3'-phosphate
ttgaccataaaccttacta

SEQ ID NO: 1836 - RNA, 19 nt, synthetic construct
  source 1..19: mol_type = other RNA
  modified_base 1: mod_base = OTHER; note = 2'-O-methyl-uridine-3'-phosphorothioate
  modified_base 2: mod_base = OTHER; note = 2'-O-methyl-guanosine-3'-phosphorothioate
  modified_base 3: mod_base = OTHER; note = 2'-O-methyl-adenosine-3'-phosphate
  modified_base 4: mod_base = OTHER; note = 2'-O-methyl-cytidine-3'-phosphate
  modified_base 5: mod_base = OTHER; note = 2'-deoxy-2'-fluoro-cytidine-3'-phosphate
  modified_base 6: mod_base = OTHER; note = 2'-O-methyl-adenosine-3'-phosphate
  modified_base 7: mod_base = OTHER; note = 2'-deoxy-2'-fluoro-uridine-3'-phosphate
  modified_base 8: mod_base = OTHER; note = 2'-deoxy-2'-fluoro-adenosine-3'-phosphate
  modified_base 9: mod_base = OTHER; note = 2'-deoxy-2'-fluoro-adenosine-3'-phosphate
  modified_base 10: mod_base = OTHER; note = 2'-O-methyl-adenosine-3'-phosphate
  modified_base 11: mod_base = OTHER; note = 2'-O-methyl-cytidine-3'-phosphate
  modified_base 12: mod_base = OTHER; note = 2'-O-methyl-cytidine-3'-phosphate
  modified_base 13: mod_base = OTHER; note = 2'-O-methyl-uridine-3'-phosphate
  modified_base 14: mod_base = OTHER; note = 2'-O-methyl-uridine-3'-phosphate
  modified_base 15: mod_base = OTHER; note = 2'-O-methyl-adenosine-3'-phosphate
  modified_base 16: mod_base = OTHER; note = 2'-O-methyl-cytidine-3'-phosphate
  modified_base 17: mod_base = OTHER; note = 2'-O-methyl-uridine-3'-phosphate
  modified_base 18: mod_base = OTHER; note = 2'-O-methyl-guanosine-3'-phosphate
  modified_base 19: mod_base = OTHER; note = 2'-O-methyl-adenosine-3'-phosphate
tgaccataaaccttactga

SEQ ID NO: 1837 - RNA, 19 nt, synthetic construct
  source 1..19: mol_type = other RNA
  modified_base 1: mod_base = OTHER; note = 2'-O-methyl-guanosine-3'-phosphorothioate
  modified_base 2: mod_base = OTHER; note = 2'-O-methyl-adenosine-3'-phosphorothioate
  modified_base 3: mod_base = OTHER; note = 2'-O-methyl-cytidine-3'-phosphate
  modified_base 4: mod_base = OTHER; note = 2'-O-methyl-cytidine-3'-phosphate
  modified_base 5: mod_base = OTHER; note = 2'-deoxy-2'-fluoro-adenosine-3'-phosphate
  modified_base 6: mod_base = OTHER; note = 2'-O-methyl-uridine-3'-phosphate
  modified_base 7: mod_base = OTHER; note = 2'-deoxy-2'-fluoro-adenosine-3'-phosphate
  modified_base 8: mod_base = OTHER; note = 2'-deoxy-2'-fluoro-adenosine-3'-phosphate
  modified_base 9: mod_base = OTHER; note = 2'-deoxy-2'-fluoro-adenosine-3'-phosphate
  modified_base 10: mod_base = OTHER; note = 2'-O-methyl-cytidine-3'-phosphate
  modified_base 11: mod_base = OTHER; note = 2'-O-methyl-cytidine-3'-phosphate
  modified_base 12: mod_base = OTHER; note = 2'-O-methyl-uridine-3'-phosphate
  modified_base 13: mod_base = OTHER; note = 2'-O-methyl-uridine-3'-phosphate
  modified_base 14: mod_base = OTHER; note = 2'-O-methyl-adenosine-3'-phosphate
  modified_base 15: mod_base = OTHER; note = 2'-O-methyl-cytidine-3'-phosphate
  modified_base 16: mod_base = OTHER; note = 2'-O-methyl-uridine-3'-phosphate
  modified_base 17: mod_base = OTHER; note = 2'-O-methyl-guanosine-3'-phosphate
  modified_base 18: mod_base = OTHER; note = 2'-O-methyl-adenosine-3'-phosphate
  modified_base 19: mod_base = OTHER; note = 2'-O-methyl-adenosine-3'-phosphate
gaccataaaccttactgaa

SEQ ID NO: 1838 - RNA, 19 nt, synthetic construct
  source 1..19: mol_type = other RNA
  modified_base 1: mod_base = OTHER; note = 2'-O-methyl-adenosine-3'-phosphorothioate
  modified_base 2: mod_base = OTHER; note = 2'-O-methyl-cytidine-3'-phosphorothioate
  modified_base 3: mod_base = OTHER; note = 2'-O-methyl-cytidine-3'-phosphate
  modified_base 4: mod_base = OTHER; note = 2'-O-methyl-adenosine-3'-phosphate
  modified_base 5: mod_base = OTHER; note = 2'-deoxy-2'-fluoro-uridine-3'-phosphate
  modified_base 6: mod_base = OTHER; note = 2'-O-methyl-adenosine-3'-phosphate
  modified_base 7: mod_base = OTHER; note = 2'-deoxy-2'-fluoro-adenosine-3'-phosphate
  modified_base 8: mod_base = OTHER; note = 2'-deoxy-2'-fluoro-adenosine-3'-phosphate
  modified_base 9: mod_base = OTHER; note = 2'-deoxy-2'-fluoro-cytidine-3'-phosphate
  modified_base 10: mod_base = OTHER; note = 2'-O-methyl-cytidine-3'-phosphate
  modified_base 11: mod_base = OTHER; note = 2'-O-methyl-uridine-3'-phosphate
  modified_base 12: mod_base = OTHER; note = 2'-O-methyl-uridine-3'-phosphate
  modified_base 13: mod_base = OTHER; note = 2'-O-methyl-adenosine-3'-phosphate
  modified_base 14: mod_base = OTHER; note = 2'-O-methyl-cytidine-3'-phosphate
  modified_base 15: mod_base = OTHER; note = 2'-O-methyl-uridine-3'-phosphate
  modified_base 16: mod_base = OTHER; note = 2'-O-methyl-guanosine-3'-phosphate
  modified_base 17: mod_base = OTHER; note = 2'-O-methyl-adenosine-3'-phosphate
  modified_base 18: mod_base = OTHER; note = 2'-O-methyl-uridine-3'-phosphate
  modified_base 19: mod_base = OTHER; note = 2'-O-methyl-adenosine-3'-phosphate
accataaaccttactgata

SEQ ID NO: 1839 - RNA, 19 nt, synthetic construct
  source 1..19: mol_type = other RNA
  modified_base 1: mod_base = OTHER; note = 2'-O-methyl-cytidine-3'-phosphorothioate
  modified_base 2: mod_base = OTHER; note = 2'-O-methyl-cytidine-3'-phosphorothioate
  modified_base 3: mod_base = OTHER; note = 2'-O-methyl-adenosine-3'-phosphate
  modified_base 4: mod_base = OTHER; note = 2'-O-methyl-uridine-3'-phosphate
  modified_base 5: mod_base = OTHER; note = 2'-deoxy-2'-fluoro-adenosine-3'-phosphate
  modified_base 6: mod_base = OTHER; note = 2'-O-methyl-adenosine-3'-phosphate
  modified_base 7: mod_base = OTHER; note = 2'-deoxy-2'-fluoro-adenosine-3'-phosphate
  modified_base 8: mod_base = OTHER; note = 2'-deoxy-2'-fluoro-cytidine-3'-phosphate
  modified_base 9: mod_base = OTHER; note = 2'-deoxy-2'-fluoro-cytidine-3'-phosphate
  modified_base 10: mod_base = OTHER; note = 2'-O-methyl-uridine-3'-phosphate
  modified_base 11: mod_base = OTHER; note = 2'-O-methyl-uridine-3'-phosphate
  modified_base 12: mod_base = OTHER; note = 2'-O-methyl-adenosine-3'-phosphate
  modified_base 13: mod_base = OTHER; note = 2'-O-methyl-cytidine-3'-phosphate
  modified_base 14: mod_base = OTHER; note = 2'-O-methyl-uridine-3'-phosphate
  modified_base 15: mod_base = OTHER; note = 2'-O-methyl-guanosine-3'-phosphate
  modified_base 16: mod_base = OTHER; note = 2'-O-methyl-adenosine-3'-phosphate
  modified_base 17: mod_base = OTHER; note = 2'-O-methyl-uridine-3'-phosphate
  modified_base 18: mod_base = OTHER; note = 2'-O-methyl-adenosine-3'-phosphate
  modified_base 19: mod_base = OTHER; note = 2'-O-methyl-adenosine-3'-phosphate
ccataaaccttactgataa

SEQ ID NO: 1840 - RNA, 19 nt, synthetic construct
  source 1..19: mol_type = other RNA
  modified_base 1: mod_base = OTHER; note = 2'-O-methyl-cytidine-3'-phosphorothioate
  modified_base 2: mod_base = OTHER; note = 2'-O-methyl-adenosine-3'-phosphorothioate
  modified_base 3: mod_base = OTHER; note = 2'-O-methyl-uridine-3'-phosphate
  modified_base 4: mod_base = OTHER; note = 2'-O-methyl-adenosine-3'-phosphate
  modified_base 5: mod_base = OTHER; note = 2'-deoxy-2'-fluoro-adenosine-3'-phosphate
  modified_base 6: mod_base = OTHER; note = 2'-O-methyl-adenosine-3'-phosphate
  modified_base 7: mod_base = OTHER; note = 2'-deoxy-2'-fluoro-cytidine-3'-phosphate
  modified_base 8: mod_base = OTHER; note = 2'-deoxy-2'-fluoro-cytidine-3'-phosphate
  modified_base 9: mod_base = OTHER; note = 2'-deoxy-2'-fluoro-uridine-3'-phosphate
  modified_base 10: mod_base = OTHER; note = 2'-O-methyl-uridine-3'-phosphate
  modified_base 11: mod_base = OTHER; note = 2'-O-methyl-adenosine-3'-phosphate
  modified_base 12: mod_base = OTHER; note = 2'-O-methyl-cytidine-3'-phosphate
  modified_base 13: mod_base = OTHER; note = 2'-O-methyl-uridine-3'-phosphate
  modified_base 14: mod_base = OTHER; note = 2'-O-methyl-guanosine-3'-phosphate
  modified_base 15: mod_base = OTHER; note = 2'-O-methyl-adenosine-3'-phosphate
  modified_base 16: mod_base = OTHER; note = 2'-O-methyl-uridine-3'-phosphate
  modified_base 17: mod_base = OTHER; note = 2'-O-methyl-adenosine-3'-phosphate
  modified_base 18: mod_base = OTHER; note = 2'-O-methyl-adenosine-3'-phosphate
  modified_base 19: mod_base = OTHER; note = 2'-O-methyl-adenosine-3'-phosphate
cataaaccttactgataaa

SEQ ID NO: 1841 - RNA, 19 nt, synthetic construct
  source 1..19: mol_type = other RNA
  modified_base 1: mod_base = OTHER; note = 2'-O-methyl-adenosine-3'-phosphorothioate
  modified_base 2: mod_base = OTHER; note = 2'-O-methyl-uridine-3'-phosphorothioate
  modified_base 3: mod_base = OTHER; note = 2'-O-methyl-adenosine-3'-phosphate
  modified_base 4: mod_base = OTHER; note = 2'-O-methyl-adenosine-3'-phosphate
  modified_base 5: mod_base = OTHER; note = 2'-deoxy-2'-fluoro-adenosine-3'-phosphate
  modified_base 6: mod_base = OTHER; note = 2'-O-methyl-cytidine-3'-phosphate
  modified_base 7: mod_base = OTHER; note = 2'-deoxy-2'-fluoro-cytidine-3'-phosphate
  modified_base 8: mod_base = OTHER; note = 2'-deoxy-2'-fluoro-uridine-3'-phosphate
  modified_base 9: mod_base = OTHER; note = 2'-deoxy-2'-fluoro-uridine-3'-phosphate
  modified_base 10: mod_base = OTHER; note = 2'-O-methyl-adenosine-3'-phosphate
  modified_base 11: mod_base = OTHER; note = 2'-O-methyl-cytidine-3'-phosphate
  modified_base 12: mod_base = OTHER; note = 2'-O-methyl-uridine-3'-phosphate
  modified_base 13: mod_base = OTHER; note = 2'-O-methyl-guanosine-3'-phosphate
  modified_base 14: mod_base = OTHER; note = 2'-O-methyl-adenosine-3'-phosphate
  modified_base 15: mod_base = OTHER; note = 2'-O-methyl-uridine-3'-phosphate
  modified_base 16: mod_base = OTHER; note = 2'-O-methyl-adenosine-3'-phosphate
  modified_base 17: mod_base = OTHER; note = 2'-O-methyl-adenosine-3'-phosphate
  modified_base 18: mod_base = OTHER; note = 2'-O-methyl-cytidine-3'-phosphate
  modified_base 19: mod_base = OTHER; note = 2'-O-methyl-adenosine-3'-phosphate
ataaaccttactgataaca

SEQ ID NO: 1842 - RNA, 19 nt, synthetic construct
  source 1..19: mol_type = other RNA
  modified_base 1: mod_base = OTHER; note = 2'-O-methyl-cytidine-3'-phosphorothioate
  modified_base 2: mod_base = OTHER; note = 2'-O-methyl-uridine-3'-phosphorothioate
  modified_base 3: mod_base = OTHER; note = 2'-O-methyl-guanosine-3'-phosphate
  modified_base 4: mod_base = OTHER; note = 2'-O-methyl-adenosine-3'-phosphate
  modified_base 5: mod_base = OTHER; note = 2'-deoxy-2'-fluoro-uridine-3'-phosphate
  modified_base 6: mod_base = OTHER; note = 2'-O-methyl-adenosine-3'-phosphate
  modified_base 7: mod_base = OTHER; note = 2'-deoxy-2'-fluoro-adenosine-3'-phosphate
  modified_base 8: mod_base = OTHER; note = 2'-deoxy-2'-fluoro-cytidine-3'-phosphate
  modified_base 9: mod_base = OTHER; note = 2'-deoxy-2'-fluoro-adenosine-3'-phosphate
  modified_base 10: mod_base = OTHER; note = 2'-O-methyl-uridine-3'-phosphate
  modified_base 11: mod_base = OTHER; note = 2'-O-methyl-adenosine-3'-phosphate
  modified_base 12: mod_base = OTHER; note = 2'-O-methyl-adenosine-3'-phosphate
  modified_base 13: mod_base = OTHER; note = 2'-O-methyl-adenosine-3'-phosphate
  modified_base 14: mod_base = OTHER; note = 2'-O-methyl-cytidine-3'-phosphate
  modified_base 15: mod_base = OTHER; note = 2'-O-methyl-adenosine-3'-phosphate
  modified_base 16: mod_base = OTHER; note = 2'-O-methyl-guanosine-3'-phosphate
  modified_base 17: mod_base = OTHER; note = 2'-O-methyl-uridine-3'-phosphate
  modified_base 18: mod_base = OTHER; note = 2'-O-methyl-adenosine-3'-phosphate
  modified_base 19: mod_base = OTHER; note = 2'-O-methyl-adenosine-3'-phosphate
ctgataacataaacagtaa

SEQ ID NO: 1843 - RNA, 19 nt, synthetic construct
  source 1..19: mol_type = other RNA
  modified_base 1: mod_base = OTHER; note = 2'-O-methyl-uridine-3'-phosphorothioate
  modified_base 2: mod_base = OTHER; note = 2'-O-methyl-cytidine-3'-phosphorothioate
  modified_base 3: mod_base = OTHER; note = 2'-O-methyl-adenosine-3'-phosphate
  modified_base 4: mod_base = OTHER; note = 2'-O-methyl-uridine-3'-phosphate
  modified_base 5: mod_base = OTHER; note = 2'-deoxy-2'-fluoro-uridine-3'-phosphate
  modified_base 6: mod_base = OTHER; note = 2'-O-methyl-adenosine-3'-phosphate
  modified_base 7: mod_base = OTHER; note = 2'-deoxy-2'-fluoro-adenosine-3'-phosphate
  modified_base 8: mod_base = OTHER; note = 2'-deoxy-2'-fluoro-adenosine-3'-phosphate
  modified_base 9: mod_base = OTHER; note = 2'-deoxy-2'-fluoro-uridine-3'-phosphate
  modified_base 10: mod_base = OTHER; note = 2'-O-methyl-guanosine-3'-phosphate
  modified_base 11: mod_base = OTHER; note = 2'-O-methyl-guanosine-3'-phosphate
  modified_base 12: mod_base = OTHER; note = 2'-O-methyl-adenosine-3'-phosphate
  modified_base 13: mod_base = OTHER; note = 2'-O-methyl-adenosine-3'-phosphate
  modified_base 14: mod_base = OTHER; note = 2'-O-methyl-guanosine-3'-phosphate
  modified_base 15: mod_base = OTHER; note = 2'-O-methyl-uridine-3'-phosphate
  modified_base 16: mod_base = OTHER; note = 2'-O-methyl-guanosine-3'-phosphate
  modified_base 17: mod_base = OTHER; note = 2'-O-methyl-guanosine-3'-phosphate
  modified_base 18: mod_base = OTHER; note = 2'-O-methyl-guanosine-3'-phosphate
  modified_base 19: mod_base = OTHER; note = 2'-O-methyl-adenosine-3'-phosphate
tcattaaatggaagtggga

SEQ ID NO: 1844 - RNA, 19 nt, synthetic construct
  source 1..19: mol_type = other RNA
  modified_base 1: mod_base = OTHER; note = 2'-O-methyl-cytidine-3'-phosphorothioate
  modified_base 2: mod_base = OTHER; note = 2'-O-methyl-adenosine-3'-phosphorothioate
  modified_base 3: mod_base = OTHER; note = 2'-O-methyl-uridine-3'-phosphate
  modified_base 4: mod_base = OTHER; note = 2'-O-methyl-uridine-3'-phosphate
  modified_base 5: mod_base = OTHER; note = 2'-deoxy-2'-fluoro-adenosine-3'-phosphate
  modified_base 6: mod_base = OTHER; note = 2'-O-methyl-adenosine-3'-phosphate
  modified_base 7: mod_base = OTHER; note = 2'-deoxy-2'-fluoro-adenosine-3'-phosphate
  modified_base 8: mod_base = OTHER; note = 2'-deoxy-2'-fluoro-uridine-3'-phosphate
  modified_base 9: mod_base = OTHER; note = 2'-deoxy-2'-fluoro-guanosine-3'-phosphate
  modified_base 10: mod_base = OTHER; note = 2'-O-methyl-guanosine-3'-phosphate
  modified_base 11: mod_base = OTHER; note = 2'-O-methyl-adenosine-3'-phosphate
  modified_base 12: mod_base = OTHER; note = 2'-O-methyl-adenosine-3'-phosphate
  modified_base 13: mod_base = OTHER; note = 2'-O-methyl-guanosine-3'-phosphate
  modified_base 14: mod_base = OTHER; note = 2'-O-methyl-uridine-3'-phosphate
  modified_base 15: mod_base = OTHER; note = 2'-O-methyl-guanosine-3'-phosphate
  modified_base 16: mod_base = OTHER; note = 2'-O-methyl-guanosine-3'-phosphate
  modified_base 17: mod_base = OTHER; note = 2'-O-methyl-guanosine-3'-phosphate
  modified_base 18: mod_base = OTHER; note = 2'-O-methyl-uridine-3'-phosphate
  modified_base 19: mod_base = OTHER; note = 2'-O-methyl-adenosine-3'-phosphate
cattaaatggaagtgggta

SEQ ID NO: 1845 - RNA, 19 nt, synthetic construct
  source 1..19: mol_type = other RNA
  modified_base 1: mod_base = OTHER; note = 2'-O-methyl-uridine-3'-phosphorothioate
  modified_base 2: mod_base = OTHER; note = 2'-O-methyl-uridine-3'-phosphorothioate
  modified_base 3: mod_base = OTHER; note = 2'-O-methyl-cytidine-3'-phosphate
  modified_base 4: mod_base = OTHER; note = 2'-O-methyl-adenosine-3'-phosphate
  modified_base 5: mod_base = OTHER; note = 2'-deoxy-2'-fluoro-uridine-3'-phosphate
  modified_base 6: mod_base = OTHER; note = 2'-O-methyl-uridine-3'-phosphate
  modified_base 7: mod_base = OTHER; note = 2'-deoxy-2'-fluoro-cytidine-3'-phosphate
  modified_base 8: mod_base = OTHER; note = 2'-deoxy-2'-fluoro-uridine-3'-phosphate
  modified_base 9: mod_base = OTHER; note = 2'-deoxy-2'-fluoro-cytidine-3'-phosphate
  modified_base 10: mod_base = OTHER; note = 2'-O-methyl-adenosine-3'-phosphate
  modified_base 11: mod_base = OTHER; note = 2'-O-methyl-uridine-3'-phosphate
  modified_base 12: mod_base = OTHER; note = 2'-O-methyl-uridine-3'-phosphate
  modified_base 13: mod_base = OTHER; note = 2'-O-methyl-guanosine-3'-phosphate
  modified_base 14: mod_base = OTHER; note = 2'-O-methyl-uridine-3'-phosphate
  modified_base 15: mod_base = OTHER; note = 2'-O-methyl-cytidine-3'-phosphate
  modified_base 16: mod_base = OTHER; note = 2'-O-methyl-uridine-3'-phosphate
  modified_base 17: mod_base = OTHER; note = 2'-O-methyl-uridine-3'-phosphate
  modified_base 18: mod_base = OTHER; note = 2'-O-methyl-cytidine-3'-phosphate
  modified_base 19: mod_base = OTHER; note = 2'-O-methyl-adenosine-3'-phosphate
ttcattctcattgtcttca

SEQ ID NO: 1846 - RNA, 19 nt, synthetic construct
  source 1..19: mol_type = other RNA
  modified_base 1: mod_base = OTHER; note = 2'-O-methyl-uridine-3'-phosphorothioate
  modified_base 2: mod_base = OTHER; note = 2'-O-methyl-cytidine-3'-phosphorothioate
  modified_base 3: mod_base = OTHER; note = 2'-O-methyl-adenosine-3'-phosphate
  modified_base 4: mod_base = OTHER; note = 2'-O-methyl-uridine-3'-phosphate
  modified_base 5: mod_base = OTHER; note = 2'-deoxy-2'-fluoro-uridine-3'-phosphate
  modified_base 6: mod_base = OTHER; note = 2'-O-methyl-cytidine-3'-phosphate
  modified_base 7: mod_base = OTHER; note = 2'-deoxy-2'-fluoro-uridine-3'-phosphate
  modified_base 8: mod_base = OTHER; note = 2'-deoxy-2'-fluoro-cytidine-3'-phosphate
  modified_base 9: mod_base = OTHER; note = 2'-deoxy-2'-fluoro-adenosine-3'-phosphate
  modified_base 10: mod_base = OTHER; note = 2'-O-methyl-uridine-3'-phosphate
  modified_base 11: mod_base = OTHER; note = 2'-O-methyl-uridine-3'-phosphate
  modified_base 12: mod_base = OTHER; note = 2'-O-methyl-guanosine-3'-phosphate
  modified_base 13: mod_base = OTHER; note = 2'-O-methyl-uridine-3'-phosphate
  modified_base 14: mod_base = OTHER; note = 2'-O-methyl-cytidine-3'-phosphate
  modified_base 15: mod_base = OTHER; note = 2'-O-methyl-uridine-3'-phosphate
  modified_base 16: mod_base = OTHER; note = 2'-O-methyl-uridine-3'-phosphate
  modified_base 17: mod_base = OTHER; note = 2'-O-methyl-cytidine-3'-phosphate
  modified_base 18: mod_base = OTHER; note = 2'-O-methyl-adenosine-3'-phosphate
  modified_base 19: mod_base = OTHER; note = 2'-O-methyl-adenosine-3'-phosphate
tcattctcattgtcttcaa

SEQ ID NO: 1847 - RNA, 19 nt, synthetic construct
  source 1..19: mol_type = other RNA
  modified_base 1: mod_base = OTHER; note = 2'-O-methyl-cytidine-3'-phosphorothioate
  modified_base 2: mod_base = OTHER; note = 2'-O-methyl-adenosine-3'-phosphorothioate
  modified_base 3: mod_base = OTHER; note = 2'-O-methyl-uridine-3'-phosphate
  modified_base 4: mod_base = OTHER; note = 2'-O-methyl-uridine-3'-phosphate
  modified_base 5: mod_base = OTHER; note = 2'-deoxy-2'-fluoro-cytidine-3'-phosphate
  modified_base 6: mod_base = OTHER; note = 2'-O-methyl-uridine-3'-phosphate
  modified_base 7: mod_base = OTHER; note = 2'-deoxy-2'-fluoro-cytidine-3'-phosphate
  modified_base 8: mod_base = OTHER; note = 2'-deoxy-2'-fluoro-adenosine-3'-phosphate
  modified_base 9: mod_base = OTHER; note = 2'-deoxy-2'-fluoro-uridine-3'-phosphate
  modified_base 10: mod_base = OTHER; note = 2'-O-methyl-uridine-3'-phosphate
  modified_base 11: mod_base = OTHER; note = 2'-O-methyl-guanosine-3'-phosphate
  modified_base 12: mod_base = OTHER; note = 2'-O-methyl-uridine-3'-phosphate
  modified_base 13: mod_base = OTHER; note = 2'-O-methyl-cytidine-3'-phosphate
  modified_base 14: mod_base = OTHER; note = 2'-O-methyl-uridine-3'-phosphate
  modified_base 15: mod_base = OTHER; note = 2'-O-methyl-uridine-3'-phosphate
  modified_base 16: mod_base = OTHER; note = 2'-O-methyl-cytidine-3'-phosphate
  modified_base 17: mod_base = OTHER; note = 2'-O-methyl-adenosine-3'-phosphate
  modified_base 18: mod_base = OTHER; note = 2'-O-methyl-cytidine-3'-phosphate
  modified_base 19: mod_base = OTHER; note = 2'-O-methyl-adenosine-3'-phosphate
cattctcattgtcttcaca

SEQ ID NO: 1848 - RNA, 19 nt, synthetic construct
  source 1..19: mol_type = other RNA
  modified_base 1: mod_base = OTHER; note = 2'-O-methyl-uridine-3'-phosphorothioate
  modified_base 2: mod_base = OTHER; note = 2'-O-methyl-cytidine-3'-phosphorothioate
  modified_base 3: mod_base = OTHER; note = 2'-O-methyl-uridine-3'-phosphate
  modified_base 4: mod_base = OTHER; note = 2'-O-methyl-cytidine-3'-phosphate
  modified_base 5: mod_base = OTHER; note = 2'-deoxy-2'-fluoro-adenosine-3'-phosphate
  modified_base 6: mod_base = OTHER; note = 2'-O-methyl-uridine-3'-phosphate
  modified_base 7: mod_base = OTHER; note = 2'-deoxy-2'-fluoro-uridine-3'-phosphate
  modified_base 8: mod_base = OTHER; note = 2'-deoxy-2'-fluoro-guanosine-3'-phosphate
  modified_base 9: mod_base = OTHER; note = 2'-deoxy-2'-fluoro-uridine-3'-phosphate
  modified_base 10: mod_base = OTHER; note = 2'-O-methyl-cytidine-3'-phosphate
  modified_base 11: mod_base = OTHER; note = 2'-O-methyl-uridine-3'-phosphate
  modified_base 12: mod_base = OTHER; note = 2'-O-methyl-uridine-3'-phosphate
  modified_base 13: mod_base = OTHER; note = 2'-O-methyl-cytidine-3'-phosphate
  modified_base 14: mod_base = OTHER; note = 2'-O-methyl-adenosine-3'-phosphate
  modified_base 15: mod_base = OTHER; note = 2'-O-methyl-cytidine-3'-phosphate
  modified_base 16: mod_base = OTHER; note = 2'-O-methyl-adenosine-3'-phosphate
  modified_base 17: mod_base = OTHER; note = 2'-O-methyl-uridine-3'-phosphate
  modified_base 18: mod_base = OTHER; note = 2'-O-methyl-uridine-3'-phosphate
  modified_base 19: mod_base = OTHER; note = 2'-O-methyl-adenosine-3'-phosphate
tctcattgtcttcacatta

SEQ ID NO: 1849 - RNA, 19 nt, synthetic construct
  source 1..19: mol_type = other RNA
  modified_base 1: mod_base = OTHER; note = 2'-O-methyl-guanosine-3'-phosphorothioate
  modified_base 2: mod_base = OTHER; note = 2'-O-methyl-uridine-3'-phosphorothioate
  modified_base 3: mod_base = OTHER; note = 2'-O-methyl-cytidine-3'-phosphate
  modified_base 4: mod_base = OTHER; note = 2'-O-methyl-uridine-3'-phosphate
  modified_base 5: mod_base = OTHER; note = 2'-deoxy-2'-fluoro-uridine-3'-phosphate
  modified_base 6: mod_base = OTHER; note = 2'-O-methyl-guanosine-3'-phosphate
  modified_base 7: mod_base = OTHER; note = 2'-deoxy-2'-fluoro-uridine-3'-phosphate
  modified_base 8: mod_base = OTHER; note = 2'-deoxy-2'-fluoro-cytidine-3'-phosphate
  modified_base 9: mod_base = OTHER; note = 2'-deoxy-2'-fluoro-uridine-3'-phosphate
  modified_base 10: mod_base = OTHER; note = 2'-O-methyl-uridine-3'-phosphate
  modified_base 11: mod_base = OTHER; note = 2'-O-methyl-adenosine-3'-phosphate
  modified_base 12: mod_base = OTHER; note = 2'-O-methyl-guanosine-3'-phosphate
  modified_base 13: mod_base = OTHER; note = 2'-O-methyl-guanosine-3'-phosphate
  modified_base 14: mod_base = OTHER; note = 2'-O-methyl-guanosine-3'-phosphate
  modified_base 15: mod_base = OTHER; note = 2'-O-methyl-guanosine-3'-phosphate
  modified_base 16: mod_base = OTHER; note = 2'-O-methyl-uridine-3'-phosphate
  modified_base 17: mod_base = OTHER; note = 2'-O-methyl-guanosine-3'-phosphate
  modified_base 18: mod_base = OTHER; note = 2'-O-methyl-uridine-3'-phosphate
  modified_base 19: mod_base = OTHER; note = 2'-O-methyl-adenosine-3'-phosphate
gtcttgtcttaggggtgta

SEQ ID NO: 1850 - RNA, 19 nt, synthetic construct
  source 1..19: mol_type = other RNA
  modified_base 1: mod_base = OTHER; note = 2'-O-methyl-uridine-3'-phosphorothioate
  modified_base 2: mod_base = OTHER; note = 2'-O-methyl-cytidine-3'-phosphorothioate
  modified_base 3: mod_base = OTHER; note = 2'-O-methyl-uridine-3'-phosphate
  modified_base 4: mod_base = OTHER; note = 2'-O-methyl-uridine-3'-phosphate
  modified_base 5: mod_base = OTHER; note = 2'-deoxy-2'-fluoro-guanosine-3'-phosphate
  modified_base 6: mod_base = OTHER; note = 2'-O-methyl-uridine-3'-phosphate
  modified_base 7: mod_base = OTHER; note = 2'-deoxy-2'-fluoro-cytidine-3'-phosphate
  modified_base 8: mod_base = OTHER; note = 2'-deoxy-2'-fluoro-uridine-3'-phosphate
  modified_base 9: mod_base = OTHER; note = 2'-deoxy-2'-fluoro-uridine-3'-phosphate
  modified_base 10: mod_base = OTHER; note = 2'-O-methyl-adenosine-3'-phosphate
  modified_base 11: mod_base = OTHER; note = 2'-O-methyl-guanosine-3'-phosphate
  modified_base 12: mod_base = OTHER; note = 2'-O-methyl-guanosine-3'-phosphate
  modified_base 13: mod_base = OTHER; note = 2'-O-methyl-guanosine-3'-phosphate
  modified_base 14: mod_base = OTHER; note = 2'-O-methyl-guanosine-3'-phosphate
  modified_base 15: mod_base = OTHER; note = 2'-O-methyl-uridine-3'-phosphate
  modified_base 16: mod_base = OTHER; note = 2'-O-methyl-guanosine-3'-phosphate
  modified_base 17: mod_base = OTHER; note = 2'-O-methyl-uridine-3'-phosphate
  modified_base 18: mod_base = OTHER; note = 2'-O-methyl-guanosine-3'-phosphate
  modified_base 19: mod_base = OTHER; note = 2'-O-methyl-adenosine-3'-phosphate
tcttgtcttaggggtgtga

SEQ ID NO: 1851 - RNA, 19 nt, synthetic construct
  source 1..19: mol_type = other RNA
  modified_base 1: mod_base = OTHER; note = 2'-O-methyl-adenosine-3'-phosphorothioate
  modified_base 2: mod_base = OTHER; note = 2'-O-methyl-uridine-3'-phosphorothioate
  modified_base 3: mod_base = OTHER; note = 2'-O-methyl-adenosine-3'-phosphate
  modified_base 4: mod_base = OTHER; note = 2'-O-methyl-uridine-3'-phosphate
  modified_base 5: mod_base = OTHER; note = 2'-deoxy-2'-fluoro-uridine-3'-phosphate
  modified_base 6: mod_base = OTHER; note = 2'-O-methyl-cytidine-3'-phosphate
  modified_base 7: mod_base = OTHER; note = 2'-deoxy-2'-fluoro-adenosine-3'-phosphate
  modified_base 8: mod_base = OTHER; note = 2'-deoxy-2'-fluoro-uridine-3'-phosphate
  modified_base 9: mod_base = OTHER; note = 2'-deoxy-2'-fluoro-guanosine-3'-phosphate
  modified_base 10: mod_base = OTHER; note = 2'-O-methyl-uridine-3'-phosphate
  modified_base 11: mod_base = OTHER; note = 2'-O-methyl-adenosine-3'-phosphate
  modified_base 12: mod_base = OTHER; note = 2'-O-methyl-uridine-3'-phosphate
  modified_base 13: mod_base = OTHER; note = 2'-O-methyl-adenosine-3'-phosphate
  modified_base 14: mod_base = OTHER; note = 2'-O-methyl-adenosine-3'-phosphate
  modified_base 15: mod_base = OTHER; note = 2'-O-methyl-guanosine-3'-phosphate
  modified_base 16: mod_base = OTHER; note = 2'-O-methyl-uridine-3'-phosphate
  modified_base 17: mod_base = OTHER; note = 2'-O-methyl-guanosine-3'-phosphate
  modified_base 18: mod_base = OTHER; note = 2'-O-methyl-guanosine-3'-phosphate
  modified_base 19: mod_base = OTHER; note = 2'-O-methyl-adenosine-3'-phosphate
atattcatgtataagtgga

SEQ ID NO: 1852 - RNA, 19 nt, synthetic construct
  source 1..19: mol_type = other RNA
  modified_base 1: mod_base = OTHER; note = 2'-O-methyl-cytidine-3'-phosphorothioate
  modified_base 2: mod_base = OTHER; note = 2'-O-methyl-adenosine-3'-phosphorothioate
  modified_base 3: mod_base = OTHER; note = 2'-O-methyl-uridine-3'-phosphate
  modified_base 4: mod_base = OTHER; note = 2'-O-methyl-guanosine-3'-phosphate
  modified_base 5: mod_base = OTHER; note = 2'-deoxy-2'-fluoro-uridine-3'-phosphate
  modified_base 6: mod_base = OTHER; note = 2'-O-methyl-adenosine-3'-phosphate
  modified_base 7: mod_base = OTHER; note = 2'-deoxy-2'-fluoro-uridine-3'-phosphate
  modified_base 8: mod_base = OTHER; note = 2'-deoxy-2'-fluoro-adenosine-3'-phosphate
  modified_base 9: mod_base = OTHER; note = 2'-deoxy-2'-fluoro-adenosine-3'-phosphate
  modified_base 10: mod_base = OTHER; note = 2'-O-methyl-guanosine-3'-phosphate
  modified_base 11: mod_base = OTHER; note = 2'-O-methyl-uridine-3'-phosphate
  modified_base 12: mod_base = OTHER; note = 2'-O-methyl-guanosine-3'-phosphate
  modified_base 13: mod_base = OTHER; note = 2'-O-methyl-guanosine-3'-phosphate
  modified_base 14: mod_base = OTHER; note = 2'-O-methyl-adenosine-3'-phosphate
  modified_base 15: mod_base = OTHER; note = 2'-O-methyl-cytidine-3'-phosphate
  modified_base 16: mod_base = OTHER; note = 2'-O-methyl-cytidine-3'-phosphate
  modified_base 17: mod_base = OTHER; note = 2'-O-methyl-cytidine-3'-phosphate
  modified_base 18: mod_base = OTHER; note = 2'-O-methyl-uridine-3'-phosphate
  modified_base 19: mod_base = OTHER; note = 2'-O-methyl-adenosine-3'-phosphate
catgtataagtggacccta

SEQ ID NO: 1853 - RNA, 19 nt, synthetic construct
  source 1..19: mol_type = other RNA
  modified_base 1: mod_base = OTHER; note = 2'-O-methyl-adenosine-3'-phosphorothioate
  modified_base 2: mod_base = OTHER; note = 2'-O-methyl-uridine-3'-phosphorothioate
  modified_base 3: mod_base = OTHER; note = 2'-O-methyl-uridine-3'-phosphate
  modified_base 4: mod_base = OTHER; note = 2'-O-methyl-uridine-3'-phosphate
  modified_base 5: mod_base = OTHER; note = 2'-deoxy-2'-fluoro-uridine-3'-phosphate
  modified_base 6: mod_base = OTHER; note = 2'-O-methyl-cytidine-3'-phosphate
  modified_base 7: mod_base = OTHER; note = 2'-deoxy-2'-fluoro-adenosine-3'-phosphate
  modified_base 8: mod_base = OTHER; note = 2'-deoxy-2'-fluoro-adenosine-3'-phosphate
  modified_base 9: mod_base = OTHER; note = 2'-deoxy-2'-fluoro-uridine-3'-phosphate
  modified_base 10: mod_base = OTHER; note = 2'-O-methyl-uridine-3'-phosphate
  modified_base 11: mod_base = OTHER; note = 2'-O-methyl-uridine-3'-phosphate
  modified_base 12: mod_base = OTHER; note = 2'-O-methyl-cytidine-3'-phosphate
  modified_base 13: mod_base = OTHER; note = 2'-O-methyl-uridine-3'-phosphate
  modified_base 14: mod_base = OTHER; note = 2'-O-methyl-cytidine-3'-phosphate
  modified_base 15: mod_base = OTHER; note = 2'-O-methyl-cytidine-3'-phosphate
  modified_base 16: mod_base = OTHER; note = 2'-O-methyl-uridine-3'-phosphate
  modified_base 17: mod_base = OTHER; note = 2'-O-methyl-cytidine-3'-phosphate
  modified_base 18: mod_base = OTHER; note = 2'-O-methyl-uridine-3'-phosphate
  modified_base 19: mod_base = OTHER; note = 2'-O-methyl-adenosine-3'-phosphate
attttcaatttctcctcta

SEQ ID NO: 1854 - RNA, 19 nt, synthetic construct
  source 1..19: mol_type = other RNA
  modified_base 1: mod_base = OTHER; note = 2'-O-methyl-uridine-3'-phosphorothioate
  modified_base 2: mod_base = OTHER; note = 2'-O-methyl-uridine-3'-phosphorothioate
  modified_base 3: mod_base = OTHER; note = 2'-O-methyl-uridine-3'-phosphate
  modified_base 4: mod_base = OTHER; note = 2'-O-methyl-uridine-3'-phosphate
  modified_base 5: mod_base = OTHER; note = 2'-deoxy-2'-fluoro-cytidine-3'-phosphate
  modified_base 6: mod_base = OTHER; note = 2'-O-methyl-adenosine-3'-phosphate
  modified_base 7: mod_base = OTHER; note = 2'-deoxy-2'-fluoro-adenosine-3'-phosphate
  modified_base 8: mod_base = OTHER; note = 2'-deoxy-2'-fluoro-uridine-3'-phosphate
  modified_base 9: mod_base = OTHER; note = 2'-deoxy-2'-fluoro-uridine-3'-phosphate
  modified_base 10: mod_base = OTHER; note = 2'-O-methyl-uridine-3'-phosphate
  modified_base 11: mod_base = OTHER; note = 2'-O-methyl-cytidine-3'-phosphate
  modified_base 12: mod_base = OTHER; note = 2'-O-methyl-uridine-3'-phosphate
  modified_base 13: mod_base = OTHER; note = 2'-O-methyl-cytidine-3'-phosphate
  modified_base 14: mod_base = OTHER; note = 2'-O-methyl-cytidine-3'-phosphate
  modified_base 15: mod_base = OTHER; note = 2'-O-methyl-uridine-3'-phosphate
  modified_base 16: mod_base = OTHER; note = 2'-O-methyl-cytidine-3'-phosphate
  modified_base 17: mod_base = OTHER; note = 2'-O-methyl-uridine-3'-phosphate
  modified_base 18: mod_base = OTHER; note = 2'-O-methyl-guanosine-3'-phosphate
  modified_base 19: mod_base = OTHER; note = 2'-O-methyl-adenosine-3'-phosphate
ttttcaatttctcctctga

SEQ ID NO: 1855 - RNA, 19 nt, synthetic construct
  source 1..19: mol_type = other RNA
  modified_base 1: mod_base = OTHER; note = 2'-O-methyl-uridine-3'-phosphorothioate
  modified_base 2: mod_base = OTHER; note = 2'-O-methyl-uridine-3'-phosphorothioate
  modified_base 3: mod_base = OTHER; note = 2'-O-methyl-uridine-3'-phosphate
  modified_base 4: mod_base = OTHER; note = 2'-O-methyl-cytidine-3'-phosphate
  modified_base 5: mod_base = OTHER; note = 2'-deoxy-2'-fluoro-adenosine-3'-phosphate
  modified_base 6: mod_base = OTHER; note = 2'-O-methyl-adenosine-3'-phosphate
  modified_base 7: mod_base = OTHER; note = 2'-deoxy-2'-fluoro-uridine-3'-phosphate
  modified_base 8: mod_base = OTHER; note = 2'-deoxy-2'-fluoro-uridine-3'-phosphate
  modified_base 9: mod_base = OTHER; note = 2'-deoxy-2'-fluoro-uridine-3'-phosphate
  modified_base 10: mod_base = OTHER; note = 2'-O-methyl-cytidine-3'-phosphate
  modified_base 11: mod_base = OTHER; note = 2'-O-methyl-uridine-3'-phosphate
  modified_base 12: mod_base = OTHER; note = 2'-O-methyl-cytidine-3'-phosphate
  modified_base 13: mod_base = OTHER; note = 2'-O-methyl-cytidine-3'-phosphate
  modified_base 14: mod_base = OTHER; note = 2'-O-methyl-uridine-3'-phosphate
  modified_base 15: mod_base = OTHER; note = 2'-O-methyl-cytidine-3'-phosphate
  modified_base 16: mod_base = OTHER; note = 2'-O-methyl-uridine-3'-phosphate
  modified_base 17: mod_base = OTHER; note = 2'-O-methyl-guanosine-3'-phosphate
  modified_base 18: mod_base = OTHER; note = 2'-O-methyl-adenosine-3'-phosphate
  modified_base 19: mod_base = OTHER; note = 2'-O-methyl-adenosine-3'-phosphate
tttcaatttctcctctgaa

SEQ ID NO: 1856 - RNA, 19 nt, synthetic construct
  source 1..19: mol_type = other RNA
  modified_base 1: mod_base = OTHER; note = 2'-O-methyl-guanosine-3'-phosphorothioate
  modified_base 2: mod_base = OTHER; note = 2'-O-methyl-uridine-3'-phosphorothioate
  modified_base 3: mod_base = OTHER; note = 2'-O-methyl-uridine-3'-phosphate
  modified_base 4: mod_base = OTHER; note = 2'-O-methyl-adenosine-3'-phosphate
  modified_base 5: mod_base = OTHER; note = 2'-deoxy-2'-fluoro-uridine-3'-phosphate
  modified_base 6: mod_base = OTHER; note = 2'-O-methyl-cytidine-3'-phosphate
  modified_base 7: mod_base = OTHER; note = 2'-deoxy-2'-fluoro-uridine-3'-phosphate
  modified_base 8: mod_base = OTHER; note = 2'-deoxy-2'-fluoro-cytidine-3'-phosphate
  modified_base 9: mod_base = OTHER; note = 2'-deoxy-2'-fluoro-adenosine-3'-phosphate
  modified_base 10: mod_base = OTHER; note = 2'-O-methyl-uridine-3'-phosphate
  modified_base 11: mod_base = OTHER; note = 2'-O-methyl-adenosine-3'-phosphate
  modified_base 12: mod_base = OTHER; note = 2'-O-methyl-uridine-3'-phosphate
  modified_base 13: mod_base = OTHER; note = 2'-O-methyl-uridine-3'-phosphate
  modified_base 14: mod_base = OTHER; note = 2'-O-methyl-uridine-3'-phosphate
  modified_base 15: mod_base = OTHER; note = 2'-O-methyl-guanosine-3'-phosphate
  modified_base 16: mod_base = OTHER; note = 2'-O-methyl-guanosine-3'-phosphate
  modified_base 17: mod_base = OTHER; note = 2'-O-methyl-cytidine-3'-phosphate
  modified_base 18: mod_base = OTHER; note = 2'-O-methyl-uridine-3'-phosphate
  modified_base 19: mod_base = OTHER; note = 2'-O-methyl-adenosine-3'-phosphate
gttatctcatatttggcta

SEQ ID NO: 1857 - RNA, 19 nt, synthetic construct
  source 1..19: mol_type = other RNA
  modified_base 1: mod_base = OTHER; note = 2'-O-methyl-cytidine-3'-phosphorothioate
  modified_base 2: mod_base = OTHER; note = 2'-O-methyl-adenosine-3'-phosphorothioate
  modified_base 3: mod_base = OTHER; note = 2'-O-methyl-adenosine-3'-phosphate
  modified_base 4: mod_base = OTHER; note = 2'-O-methyl-guanosine-3'-phosphate
  modified_base 5: mod_base = OTHER; note = 2'-deoxy-2'-fluoro-cytidine-3'-phosphate
  modified_base 6: mod_base = OTHER; note = 2'-O-methyl-adenosine-3'-phosphate
  modified_base 7: mod_base = OTHER; note = 2'-deoxy-2'-fluoro-cytidine-3'-phosphate
  modified_base 8: mod_base = OTHER; note = 2'-deoxy-2'-fluoro-guanosine-3'-phosphate
  modified_base 9: mod_base = OTHER; note = 2'-deoxy-2'-fluoro-uridine-3'-phosphate
  modified_base 10: mod_base = OTHER; note = 2'-O-methyl-cytidine-3'-phosphate
  modified_base 11: mod_base = OTHER; note = 2'-O-methyl-adenosine-3'-phosphate
  modified_base 12: mod_base = OTHER; note = 2'-O-methyl-adenosine-3'-phosphate
  modified_base 13: mod_base = OTHER; note = 2'-O-methyl-adenosine-3'-phosphate
  modified_base 14: mod_base = OTHER; note = 2'-O-methyl-adenosine-3'-phosphate
  modified_base 15: mod_base = OTHER; note = 2'-O-methyl-guanosine-3'-phosphate
  modified_base 16: mod_base = OTHER; note = 2'-O-methyl-cytidine-3'-phosphate
  modified_base 17: mod_base = OTHER; note = 2'-O-methyl-uridine-3'-phosphate
  modified_base 18: mod_base = OTHER; note = 2'-O-methyl-adenosine-3'-phosphate
  modified_base 19: mod_base = OTHER; note = 2'-O-methyl-adenosine-3'-phosphate
caagcacgtcaaaagctaa

SEQ ID NO: 1858 - RNA, 19 nt, synthetic construct
  source 1..19: mol_type = other RNA
  modified_base 1: mod_base = OTHER; note = 2'-O-methyl-adenosine-3'-phosphorothioate
  modified_base 2: mod_base = OTHER; note = 2'-O-methyl-guanosine-3'-phosphorothioate
  modified_base 3: mod_base = OTHER; note = 2'-O-methyl-cytidine-3'-phosphate
  modified_base 4: mod_base = OTHER; note = 2'-O-methyl-adenosine-3'-phosphate
  modified_base 5: mod_base = OTHER; note = 2'-deoxy-2'-fluoro-cytidine-3'-phosphate
  modified_base 6: mod_base = OTHER; note = 2'-O-methyl-guanosine-3'-phosphate
  modified_base 7: mod_base = OTHER; note = 2'-deoxy-2'-fluoro-uridine-3'-phosphate
  modified_base 8: mod_base = OTHER; note = 2'-deoxy-2'-fluoro-cytidine-3'-phosphate
  modified_base 9: mod_base = OTHER; note = 2'-deoxy-2'-fluoro-adenosine-3'-phosphate
  modified_base 10: mod_base = OTHER; note = 2'-O-methyl-adenosine-3'-phosphate
  modified_base 11: mod_base = OTHER; note = 2'-O-methyl-adenosine-3'-phosphate
  modified_base 12: mod_base = OTHER; note = 2'-O-methyl-adenosine-3'-phosphate
  modified_base 13: mod_base = OTHER; note = 2'-O-methyl-guanosine-3'-phosphate
  modified_base 14: mod_base = OTHER; note = 2'-O-methyl-cytidine-3'-phosphate
  modified_base 15: mod_base = OTHER; note = 2'-O-methyl-uridine-3'-phosphate
  modified_base 16: mod_base = OTHER; note = 2'-O-methyl-adenosine-3'-phosphate
  modified_base 17: mod_base = OTHER; note = 2'-O-methyl-cytidine-3'-phosphate
  modified_base 18: mod_base = OTHER; note = 2'-O-methyl-adenosine-3'-phosphate
  modified_base 19: mod_base = OTHER; note = 2'-O-methyl-adenosine-3'-phosphate
agcacgtcaaaagctacaa

SEQ ID NO: 1859 - RNA, 19 nt, synthetic construct
  source 1..19: mol_type = other RNA
  modified_base 1: mod_base = OTHER; note = 2'-O-methyl-cytidine-3'-phosphorothioate
  modified_base 2: mod_base = OTHER; note = 2'-O-methyl-guanosine-3'-phosphorothioate
  modified_base 3: mod_base = OTHER; note = 2'-O-methyl-uridine-3'-phosphate
  modified_base 4: mod_base = OTHER; note = 2'-O-methyl-cytidine-3'-phosphate
  modified_base 5: mod_base = OTHER; note = 2'-deoxy-2'-fluoro-adenosine-3'-phosphate
  modified_base 6: mod_base = OTHER; note = 2'-O-methyl-adenosine-3'-phosphate
  modified_base 7: mod_base = OTHER; note = 2'-deoxy-2'-fluoro-adenosine-3'-phosphate
  modified_base 8: mod_base = OTHER; note = 2'-deoxy-2'-fluoro-adenosine-3'-phosphate
  modified_base 9: mod_base = OTHER; note = 2'-deoxy-2'-fluoro-guanosine-3'-phosphate
  modified_base 10: mod_base = OTHER; note = 2'-O-methyl-cytidine-3'-phosphate
  modified_base 11: mod_base = OTHER; note = 2'-O-methyl-uridine-3'-phosphate
  modified_base 12: mod_base = OTHER; note = 2'-O-methyl-adenosine-3'-phosphate
  modified_base 13: mod_base = OTHER; note = 2'-O-methyl-cytidine-3'-phosphate
  modified_base 14: mod_base = OTHER; note = 2'-O-methyl-adenosine-3'-phosphate
  modified_base 15: mod_base = OTHER; note = 2'-O-methyl-guanosine-3'-phosphate
  modified_base 16: mod_base = OTHER; note = 2'-O-methyl-adenosine-3'-phosphate
  modified_base 17: mod_base = OTHER; note = 2'-O-methyl-adenosine-3'-phosphate
  modified_base 18: mod_base = OTHER; note = 2'-O-methyl-uridine-3'-phosphate
  modified_base 19: mod_base = OTHER; note = 2'-O-methyl-adenosine-3'-phosphate
cgtcaaaagctacagaata

SEQ ID NO: 1860 - RNA, 19 nt, synthetic construct
  source 1..19: mol_type = other RNA
  modified_base 1: mod_base = OTHER; note = 2'-O-methyl-guanosine-3'-phosphorothioate
  modified_base 2: mod_base = OTHER; note = 2'-O-methyl-uridine-3'-phosphorothioate
  modified_base 3: mod_base = OTHER; note = 2'-O-methyl-cytidine-3'-phosphate
  modified_base 4: mod_base = OTHER; note = 2'-O-methyl-adenosine-3'-phosphate
  modified_base 5: mod_base = OTHER; note = 2'-deoxy-2'-fluoro-adenosine-3'-phosphate
  modified_base 6: mod_base = OTHER; note = 2'-O-methyl-adenosine-3'-phosphate
  modified_base 7: mod_base = OTHER; note = 2'-deoxy-2'-fluoro-adenosine-3'-phosphate
  modified_base 8: mod_base = OTHER; note = 2'-deoxy-2'-fluoro-guanosine-3'-phosphate
  modified_base 9: mod_base = OTHER; note = 2'-deoxy-2'-fluoro-cytidine-3'-phosphate
  modified_base 10: mod_base = OTHER; note = 2'-O-methyl-uridine-3'-phosphate
  modified_base 11: mod_base = OTHER; note = 2'-O-methyl-adenosine-3'-phosphate
  modified_base 12: mod_base = OTHER; note = 2'-O-methyl-cytidine-3'-phosphate
  modified_base 13: mod_base = OTHER; note = 2'-O-methyl-adenosine-3'-phosphate
  modified_base 14: mod_base = OTHER; note = 2'-O-methyl-guanosine-3'-phosphate
  modified_base 15: mod_base = OTHER; note = 2'-O-methyl-adenosine-3'-phosphate
  modified_base 16: mod_base = OTHER; note = 2'-O-methyl-adenosine-3'-phosphate
  modified_base 17: mod_base = OTHER; note = 2'-O-methyl-uridine-3'-phosphate
  modified_base 18: mod_base = OTHER; note = 2'-O-methyl-cytidine-3'-phosphate
  modified_base 19: mod_base = OTHER; note = 2'-O-methyl-adenosine-3'-phosphate
gtcaaaagctacagaatca

SEQ ID NO: 1861 - RNA, 19 nt, synthetic construct
  source 1..19: mol_type = other RNA
  modified_base 1: mod_base = OTHER; note = 2'-O-methyl-uridine-3'-phosphorothioate
  modified_base 2: mod_base = OTHER; note = 2'-O-methyl-guanosine-3'-phosphorothioate
  modified_base 3: mod_base = OTHER; note = 2'-O-methyl-uridine-3'-phosphate
  modified_base 4: mod_base = OTHER; note = 2'-O-methyl-adenosine-3'-phosphate
  modified_base 5: mod_base = OTHER; note = 2'-deoxy-2'-fluoro-adenosine-3'-phosphate
  modified_base 6: mod_base = OTHER; note = 2'-O-methyl-adenosine-3'-phosphate
  modified_base 7: mod_base = OTHER; note = 2'-deoxy-2'-fluoro-cytidine-3'-phosphate
  modified_base 8: mod_base = OTHER; note = 2'-deoxy-2'-fluoro-adenosine-3'-phosphate
  modified_base 9: mod_base = OTHER; note = 2'-deoxy-2'-fluoro-uridine-3'-phosphate
  modified_base 10: mod_base = OTHER; note = 2'-O-methyl-guanosine-3'-phosphate
  modified_base 11: mod_base = OTHER; note = 2'-O-methyl-adenosine-3'-phosphate
  modified_base 12: mod_base = OTHER; note = 2'-O-methyl-adenosine-3'-phosphate
  modified_base 13: mod_base = OTHER; note = 2'-O-methyl-adenosine-3'-phosphate
  modified_base 14: mod_base = OTHER; note = 2'-O-methyl-adenosine-3'-phosphate
  modified_base 15: mod_base = OTHER; note = 2'-O-methyl-guanosine-3'-phosphate
  modified_base 16: mod_base = OTHER; note = 2'-O-methyl-guanosine-3'-phosphate
  modified_base 17: mod_base = OTHER; note = 2'-O-methyl-guanosine-3'-phosphate
  modified_base 18: mod_base = OTHER; note = 2'-O-methyl-cytidine-3'-phosphate
  modified_base 19: mod_base = OTHER; note = 2'-O-methyl-adenosine-3'-phosphate
tgtaaacatgaaaagggca

SEQ ID NO: 1862 - RNA, 19 nt, synthetic construct
  source 1..19: mol_type = other RNA
  modified_base 1: mod_base = OTHER; note = 2'-O-methyl-guanosine-3'-phosphorothioate
  modified_base 2: mod_base = OTHER; note = 2'-O-methyl-uridine-3'-phosphorothioate
  modified_base 3: mod_base = OTHER; note = 2'-O-methyl-adenosine-3'-phosphate
  modified_base 4: mod_base = OTHER; note = 2'-O-methyl-adenosine-3'-phosphate
  modified_base 5: mod_base = OTHER; note = 2'-deoxy-2'-fluoro-adenosine-3'-phosphate
  modified_base 6: mod_base = OTHER; note = 2'-O-methyl-cytidine-3'-phosphate
  modified_base 7: mod_base = OTHER; note = 2'-deoxy-2'-fluoro-adenosine-3'-phosphate
  modified_base 8: mod_base = OTHER; note = 2'-deoxy-2'-fluoro-uridine-3'-phosphate
  modified_base 9: mod_base = OTHER; note = 2'-deoxy-2'-fluoro-guanosine-3'-phosphate
  modified_base 10: mod_base = OTHER; note = 2'-O-methyl-adenosine-3'-phosphate
  modified_base 11: mod_base = OTHER; note = 2'-O-methyl-adenosine-3'-phosphate
  modified_base 12: mod_base = OTHER; note = 2'-O-methyl-adenosine-3'-phosphate
  modified_base 13: mod_base = OTHER; note = 2'-O-methyl-adenosine-3'-phosphate
  modified_base 14: mod_base = OTHER; note = 2'-O-methyl-guanosine-3'-phosphate
  modified_base 15: mod_base = OTHER; note = 2'-O-methyl-guanosine-3'-phosphate
  modified_base 16: mod_base = OTHER; note = 2'-O-methyl-guanosine-3'-phosphate
  modified_base 17: mod_base = OTHER; note = 2'-O-methyl-cytidine-3'-phosphate
  modified_base 18: mod_base = OTHER; note = 2'-O-methyl-uridine-3'-phosphate
  modified_base 19: mod_base = OTHER; note = 2'-O-methyl-adenosine-3'-phosphate
gtaaacatgaaaagggcta

SEQ ID NO: 1863 - RNA, 19 nt, synthetic construct
  source 1..19: mol_type = other RNA
  modified_base 1: mod_base = OTHER; note = 2'-O-methyl-adenosine-3'-phosphorothioate
  modified_base 2: mod_base = OTHER; note = 2'-O-methyl-adenosine-3'-phosphorothioate
  modified_base 3: mod_base = OTHER; note = 2'-O-methyl-cytidine-3'-phosphate
  modified_base 4: mod_base = OTHER; note = 2'-O-methyl-adenosine-3'-phosphate
  modified_base 5: mod_base = OTHER; note = 2'-deoxy-2'-fluoro-guanosine-3'-phosphate
  modified_base 6: mod_base = OTHER; note = 2'-O-methyl-adenosine-3'-phosphate
  modified_base 7: mod_base = OTHER; note = 2'-deoxy-2'-fluoro-uridine-3'-phosphate
  modified_base 8: mod_base = OTHER; note = 2'-deoxy-2'-fluoro-guanosine-3'-phosphate
  modified_base 9: mod_base = OTHER; note = 2'-deoxy-2'-fluoro-adenosine-3'-phosphate
  modified_base 10: mod_base = OTHER; note = 2'-O-methyl-guanosine-3'-phosphate
  modified_base 11: mod_base = OTHER; note = 2'-O-methyl-adenosine-3'-phosphate
  modified_base 12: mod_base = OTHER; note = 2'-O-methyl-adenosine-3'-phosphate
  modified_base 13: mod_base = OTHER; note = 2'-O-methyl-cytidine-3'-phosphate
  modified_base 14: mod_base = OTHER; note = 2'-O-methyl-uridine-3'-phosphate
  modified_base 15: mod_base = OTHER; note = 2'-O-methyl-guanosine-3'-phosphate
  modified_base 16: mod_base = OTHER; note = 2'-O-methyl-guanosine-3'-phosphate
  modified_base 17: mod_base = OTHER; note = 2'-O-methyl-uridine-3'-phosphate
  modified_base 18: mod_base = OTHER; note = 2'-O-methyl-guanosine-3'-phosphate
  modified_base 19: mod_base = OTHER; note = 2'-O-methyl-adenosine-3'-phosphate
aacagatgagaactggtga

SEQ ID NO: 1864 - RNA, 19 nt, synthetic construct
  source 1..19: mol_type = other RNA
  modified_base 1: mod_base = OTHER; note = 2'-O-methyl-adenosine-3'-phosphorothioate
  modified_base 2: mod_base = OTHER; note = 2'-O-methyl-cytidine-3'-phosphorothioate
  modified_base 3: mod_base = OTHER; note = 2'-O-methyl-adenosine-3'-phosphate
  modified_base 4: mod_base = OTHER; note = 2'-O-methyl-guanosine-3'-phosphate
  modified_base 5: mod_base = OTHER; note = 2'-deoxy-2'-fluoro-adenosine-3'-phosphate
  modified_base 6: mod_base = OTHER; note = 2'-O-methyl-uridine-3'-phosphate
  modified_base 7: mod_base = OTHER; note = 2'-deoxy-2'-fluoro-guanosine-3'-phosphate
  modified_base 8: mod_base = OTHER; note = 2'-deoxy-2'-fluoro-adenosine-3'-phosphate
  modified_base 9: mod_base = OTHER; note = 2'-deoxy-2'-fluoro-guanosine-3'-phosphate
  modified_base 10: mod_base = OTHER; note = 2'-O-methyl-adenosine-3'-phosphate
  modified_base 11: mod_base = OTHER; note = 2'-O-methyl-adenosine-3'-phosphate
  modified_base 12: mod_base = OTHER; note = 2'-O-methyl-cytidine-3'-phosphate
  modified_base 13: mod_base = OTHER; note = 2'-O-methyl-uridine-3'-phosphate
  modified_base 14: mod_base = OTHER; note = 2'-O-methyl-guanosine-3'-phosphate
  modified_base 15: mod_base = OTHER; note = 2'-O-methyl-guanosine-3'-phosphate
  modified_base 16: mod_base = OTHER; note = 2'-O-methyl-uridine-3'-phosphate
  modified_base 17: mod_base = OTHER; note = 2'-O-methyl-guanosine-3'-phosphate
  modified_base 18: mod_base = OTHER; note = 2'-O-methyl-guanosine-3'-phosphate
  modified_base 19: mod_base = OTHER; note = 2'-O-methyl-adenosine-3'-phosphate
acagatgagaactggtgga

SEQ ID NO: 1865 - RNA, 19 nt, synthetic construct
  source 1..19: mol_type = other RNA
  modified_base 1: mod_base = OTHER; note = 2'-O-methyl-cytidine-3'-phosphorothioate
  modified_base 2: mod_base = OTHER; note = 2'-O-methyl-adenosine-3'-phosphorothioate
  modified_base 3: mod_base = OTHER; note = 2'-O-methyl-guanosine-3'-phosphate
  modified_base 4: mod_base = OTHER; note = 2'-O-methyl-adenosine-3'-phosphate
  modified_base 5: mod_base = OTHER; note = 2'-deoxy-2'-fluoro-uridine-3'-phosphate
  modified_base 6: mod_base = OTHER; note = 2'-O-methyl-guanosine-3'-phosphate
  modified_base 7: mod_base = OTHER; note = 2'-deoxy-2'-fluoro-adenosine-3'-phosphate
  modified_base 8: mod_base = OTHER; note = 2'-deoxy-2'-fluoro-guanosine-3'-phosphate
  modified_base 9: mod_base = OTHER; note = 2'-deoxy-2'-fluoro-adenosine-3'-phosphate
  modified_base 10: mod_base = OTHER; note = 2'-O-methyl-adenosine-3'-phosphate
  modified_base 11: mod_base = OTHER; note = 2'-O-methyl-cytidine-3'-phosphate
  modified_base 12: mod_base = OTHER; note = 2'-O-methyl-uridine-3'-phosphate
  modified_base 13: mod_base = OTHER; note = 2'-O-methyl-guanosine-3'-phosphate
  modified_base 14: mod_base = OTHER; note = 2'-O-methyl-guanosine-3'-phosphate
  modified_base 15: mod_base = OTHER; note = 2'-O-methyl-uridine-3'-phosphate
  modified_base 16: mod_base = OTHER; note = 2'-O-methyl-guanosine-3'-phosphate
  modified_base 17: mod_base = OTHER; note = 2'-O-methyl-guanosine-3'-phosphate
  modified_base 18: mod_base = OTHER; note = 2'-O-methyl-uridine-3'-phosphate
  modified_base 19: mod_base = OTHER; note = 2'-O-methyl-adenosine-3'-phosphate
cagatgagaactggtggta

SEQ ID NO: 1866 - RNA, 19 nt, synthetic construct
  source 1..19: mol_type = other RNA
  modified_base 1: mod_base = OTHER; note = 2'-O-methyl-adenosine-3'-phosphorothioate
  modified_base 2: mod_base = OTHER; note = 2'-O-methyl-guanosine-3'-phosphorothioate
  modified_base 3: mod_base = OTHER; note = 2'-O-methyl-adenosine-3'-phosphate
  modified_base 4: mod_base = OTHER; note = 2'-O-methyl-uridine-3'-phosphate
  modified_base 5: mod_base = OTHER; note = 2'-deoxy-2'-fluoro-guanosine-3'-phosphate
  modified_base 6: mod_base = OTHER; note = 2'-O-methyl-adenosine-3'-phosphate
  modified_base 7: mod_base = OTHER; note = 2'-deoxy-2'-fluoro-guanosine-3'-phosphate
  modified_base 8: mod_base = OTHER; note = 2'-deoxy-2'-fluoro-adenosine-3'-phosphate
  modified_base 9: mod_base = OTHER; note = 2'-deoxy-2'-fluoro-adenosine-3'-phosphate
  modified_base 10: mod_base = OTHER; note = 2'-O-methyl-cytidine-3'-phosphate
  modified_base 11: mod_base = OTHER; note = 2'-O-methyl-uridine-3'-phosphate
  modified_base 12: mod_base = OTHER; note = 2'-O-methyl-guanosine-3'-phosphate
  modified_base 13: mod_base = OTHER; note = 2'-O-methyl-guanosine-3'-phosphate
  modified_base 14: mod_base = OTHER; note = 2'-O-methyl-uridine-3'-phosphate
  modified_base 15: mod_base = OTHER; note = 2'-O-methyl-guanosine-3'-phosphate
  modified_base 16: mod_base = OTHER; note = 2'-O-methyl-guanosine-3'-phosphate
  modified_base 17: mod_base = OTHER; note = 2'-O-methyl-uridine-3'-phosphate
  modified_base 18: mod_base = OTHER; note = 2'-O-methyl-uridine-3'-phosphate
  modified_base 19: mod_base = OTHER; note = 2'-O-methyl-adenosine-3'-phosphate
agatgagaactggtggtta

SEQ ID NO: 1867 - RNA, 19 nt, synthetic construct
  source 1..19: mol_type = other RNA
  modified_base 1: mod_base = OTHER; note = 2'-O-methyl-guanosine-3'-phosphorothioate
  modified_base 2: mod_base = OTHER; note = 2'-O-methyl-adenosine-3'-phosphorothioate
  modified_base 3: mod_base = OTHER; note = 2'-O-methyl-uridine-3'-phosphate
  modified_base 4: mod_base = OTHER; note = 2'-O-methyl-guanosine-3'-phosphate
  modified_base 5: mod_base = OTHER; note = 2'-deoxy-2'-fluoro-adenosine-3'-phosphate
  modified_base 6: mod_base = OTHER; note = 2'-O-methyl-guanosine-3'-phosphate
  modified_base 7: mod_base = OTHER; note = 2'-deoxy-2'-fluoro-adenosine-3'-phosphate
  modified_base 8: mod_base = OTHER; note = 2'-deoxy-2'-fluoro-adenosine-3'-phosphate
  modified_base 9: mod_base = OTHER; note = 2'-deoxy-2'-fluoro-cytidine-3'-phosphate
  modified_base 10: mod_base = OTHER; note = 2'-O-methyl-uridine-3'-phosphate
  modified_base 11: mod_base = OTHER; note = 2'-O-methyl-guanosine-3'-phosphate
  modified_base 12: mod_base = OTHER; note = 2'-O-methyl-guanosine-3'-phosphate
  modified_base 13: mod_base = OTHER; note = 2'-O-methyl-uridine-3'-phosphate
  modified_base 14: mod_base = OTHER; note = 2'-O-methyl-guanosine-3'-phosphate
  modified_base 15: mod_base = OTHER; note = 2'-O-methyl-guanosine-3'-phosphate
  modified_base 16: mod_base = OTHER; note = 2'-O-methyl-uridine-3'-phosphate
  modified_base 17: mod_base = OTHER; note = 2'-O-methyl-uridine-3'-phosphate
  modified_base 18: mod_base = OTHER; note = 2'-O-methyl-adenosine-3'-phosphate
  modified_base 19: mod_base = OTHER; note = 2'-O-methyl-adenosine-3'-phosphate
gatgagaactggtggttaa

SEQ ID NO: 1868 - RNA, 19 nt, synthetic construct
  source 1..19: mol_type = other RNA
  modified_base 1: mod_base = OTHER; note = 2'-O-methyl-adenosine-3'-phosphorothioate
  modified_base 2: mod_base = OTHER; note = 2'-O-methyl-uridine-3'-phosphorothioate
  modified_base 3: mod_base = OTHER; note = 2'-O-methyl-guanosine-3'-phosphate
  modified_base 4: mod_base = OTHER; note = 2'-O-methyl-adenosine-3'-phosphate
  modified_base 5: mod_base = OTHER; note = 2'-deoxy-2'-fluoro-guanosine-3'-phosphate
  modified_base 6: mod_base = OTHER; note = 2'-O-methyl-adenosine-3'-phosphate
  modified_base 7: mod_base = OTHER; note = 2'-deoxy-2'-fluoro-adenosine-3'-phosphate
  modified_base 8: mod_base = OTHER; note = 2'-deoxy-2'-fluoro-cytidine-3'-phosphate
  modified_base 9: mod_base = OTHER; note = 2'-deoxy-2'-fluoro-uridine-3'-phosphate
  modified_base 10: mod_base = OTHER; note = 2'-O-methyl-guanosine-3'-phosphate
  modified_base 11: mod_base = OTHER; note = 2'-O-methyl-guanosine-3'-phosphate
  modified_base 12: mod_base = OTHER; note = 2'-O-methyl-uridine-3'-phosphate
  modified_base 13: mod_base = OTHER; note = 2'-O-methyl-guanosine-3'-phosphate
  modified_base 14: mod_base = OTHER; note = 2'-O-methyl-guanosine-3'-phosphate
  modified_base 15: mod_base = OTHER; note = 2'-O-methyl-uridine-3'-phosphate
  modified_base 16: mod_base = OTHER; note = 2'-O-methyl-uridine-3'-phosphate
  modified_base 17: mod_base = OTHER; note = 2'-O-methyl-adenosine-3'-phosphate
  modified_base 18: mod_base = OTHER; note = 2'-O-methyl-adenosine-3'-phosphate
  modified_base 19: mod_base = OTHER; note = 2'-O-methyl-adenosine-3'-phosphate
atgagaactggtggttaaa

SEQ ID NO: 1869 - RNA, 19 nt, synthetic construct
  source 1..19: mol_type = other RNA
  modified_base 1: mod_base = OTHER; note = 2'-O-methyl-uridine-3'-phosphorothioate
  modified_base 2: mod_base = OTHER; note = 2'-O-methyl-guanosine-3'-phosphorothioate
  modified_base 3: mod_base = OTHER; note = 2'-O-methyl-adenosine-3'-phosphate
  modified_base 4: mod_base = OTHER; note = 2'-O-methyl-guanosine-3'-phosphate
  modified_base 5: mod_base = OTHER; note = 2'-deoxy-2'-fluoro-adenosine-3'-phosphate
  modified_base 6: mod_base = OTHER; note = 2'-O-methyl-adenosine-3'-phosphate
  modified_base 7: mod_base = OTHER; note = 2'-deoxy-2'-fluoro-cytidine-3'-phosphate
  modified_base 8: mod_base = OTHER; note = 2'-deoxy-2'-fluoro-uridine-3'-phosphate
  modified_base 9: mod_base = OTHER; note = 2'-deoxy-2'-fluoro-guanosine-3'-phosphate
  modified_base 10: mod_base = OTHER; note = 2'-O-methyl-guanosine-3'-phosphate
  modified_base 11: mod_base = OTHER; note = 2'-O-methyl-uridine-3'-phosphate
  modified_base 12: mod_base = OTHER; note = 2'-O-methyl-guanosine-3'-phosphate
  modified_base 13: mod_base = OTHER; note = 2'-O-methyl-guanosine-3'-phosphate
  modified_base 14: mod_base = OTHER; note = 2'-O-methyl-uridine-3'-phosphate
  modified_base 15: mod_base = OTHER; note = 2'-O-methyl-uridine-3'-phosphate
  modified_base 16: mod_base = OTHER; note = 2'-O-methyl-adenosine-3'-phosphate
  modified_base 17: mod_base = OTHER; note = 2'-O-methyl-adenosine-3'-phosphate
  modified_base 18: mod_base = OTHER; note = 2'-O-methyl-uridine-3'-phosphate
  modified_base 19: mod_base = OTHER; note = 2'-O-methyl-adenosine-3'-phosphate
tgagaactggtggttaata

SEQ ID NO: 1870 - RNA, 19 nt, synthetic construct
  source 1..19: mol_type = other RNA
  modified_base 1: mod_base = OTHER; note = 2'-O-methyl-guanosine-3'-phosphorothioate
  modified_base 2: mod_base = OTHER; note = 2'-O-methyl-adenosine-3'-phosphorothioate
  modified_base 3: mod_base = OTHER; note = 2'-O-methyl-guanosine-3'-phosphate
  modified_base 4: mod_base = OTHER; note = 2'-O-methyl-adenosine-3'-phosphate
  modified_base 5: mod_base = OTHER; note = 2'-deoxy-2'-fluoro-adenosine-3'-phosphate
  modified_base 6: mod_base = OTHER; note = 2'-O-methyl-cytidine-3'-phosphate
  modified_base 7: mod_base = OTHER; note = 2'-deoxy-2'-fluoro-uridine-3'-phosphate
  modified_base 8: mod_base = OTHER; note = 2'-deoxy-2'-fluoro-guanosine-3'-phosphate
  modified_base 9: mod_base = OTHER; note = 2'-deoxy-2'-fluoro-guanosine-3'-phosphate
  modified_base 10: mod_base = OTHER; note = 2'-O-methyl-uridine-3'-phosphate
  modified_base 11: mod_base = OTHER; note = 2'-O-methyl-guanosine-3'-phosphate
  modified_base 12: mod_base = OTHER; note = 2'-O-methyl-guanosine-3'-phosphate
  modified_base 13: mod_base = OTHER; note = 2'-O-methyl-uridine-3'-phosphate
  modified_base 14: mod_base = OTHER; note = 2'-O-methyl-uridine-3'-phosphate
  modified_base 15: mod_base = OTHER; note = 2'-O-methyl-adenosine-3'-phosphate
  modified_base 16: mod_base = OTHER; note = 2'-O-methyl-adenosine-3'-phosphate
  modified_base 17: mod_base = OTHER; note = 2'-O-methyl-uridine-3'-phosphate
  modified_base 18: mod_base = OTHER; note = 2'-O-methyl-adenosine-3'-phosphate
  modified_base 19: mod_base = OTHER; note = 2'-O-methyl-adenosine-3'-phosphate
gagaactggtggttaataa

SEQ ID NO: 1871 - RNA, 19 nt, synthetic construct
  source 1..19: mol_type = other RNA
  modified_base 1: mod_base = OTHER; note = 2'-O-methyl-adenosine-3'-phosphorothioate
  modified_base 2: mod_base = OTHER; note = 2'-O-methyl-guanosine-3'-phosphorothioate
  modified_base 3: mod_base = OTHER; note = 2'-O-methyl-adenosine-3'-phosphate
  modified_base 4: mod_base = OTHER; note = 2'-O-methyl-adenosine-3'-phosphate
  modified_base 5: mod_base = OTHER; note = 2'-deoxy-2'-fluoro-cytidine-3'-phosphate
  modified_base 6: mod_base = OTHER; note = 2'-O-methyl-uridine-3'-phosphate
  modified_base 7: mod_base = OTHER; note = 2'-deoxy-2'-fluoro-guanosine-3'-phosphate
  modified_base 8: mod_base = OTHER; note = 2'-deoxy-2'-fluoro-guanosine-3'-phosphate
  modified_base 9: mod_base = OTHER; note = 2'-deoxy-2'-fluoro-uridine-3'-phosphate
  modified_base 10: mod_base = OTHER; note = 2'-O-methyl-guanosine-3'-phosphate
  modified_base 11: mod_base = OTHER; note = 2'-O-methyl-guanosine-3'-phosphate
  modified_base 12: mod_base = OTHER; note = 2'-O-methyl-uridine-3'-phosphate
  modified_base 13: mod_base = OTHER; note = 2'-O-methyl-uridine-3'-phosphate
  modified_base 14: mod_base = OTHER; note = 2'-O-methyl-adenosine-3'-phosphate
  modified_base 15: mod_base = OTHER; note = 2'-O-methyl-adenosine-3'-phosphate
  modified_base 16: mod_base = OTHER; note = 2'-O-methyl-uridine-3'-phosphate
  modified_base 17: mod_base = OTHER; note = 2'-O-methyl-adenosine-3'-phosphate
  modified_base 18: mod_base = OTHER; note = 2'-O-methyl-uridine-3'-phosphate
  modified_base 19: mod_base = OTHER; note = 2'-O-methyl-adenosine-3'-phosphate
agaactggtggttaatata

SEQ ID NO: 1872 - RNA, 19 nt, synthetic construct
  source 1..19: mol_type = other RNA
  modified_base 1: mod_base = OTHER; note = 2'-O-methyl-uridine-3'-phosphorothioate
  modified_base 2: mod_base = OTHER; note = 2'-O-methyl-uridine-3'-phosphorothioate
  modified_base 3: mod_base = OTHER; note = 2'-O-methyl-uridine-3'-phosphate
  modified_base 4: mod_base = OTHER; note = 2'-O-methyl-guanosine-3'-phosphate
  modified_base 5: mod_base = OTHER; note = 2'-deoxy-2'-fluoro-guanosine-3'-phosphate
  modified_base 6: mod_base = OTHER; note = 2'-O-methyl-adenosine-3'-phosphate
  modified_base 7: mod_base = OTHER; note = 2'-deoxy-2'-fluoro-adenosine-3'-phosphate
  modified_base 8: mod_base = OTHER; note = 2'-deoxy-2'-fluoro-uridine-3'-phosphate
  modified_base 9: mod_base = OTHER; note = 2'-deoxy-2'-fluoro-cytidine-3'-phosphate
  modified_base 10: mod_base = OTHER; note = 2'-O-methyl-adenosine-3'-phosphate
  modified_base 11: mod_base = OTHER; note = 2'-O-methyl-uridine-3'-phosphate
  modified_base 12: mod_base = OTHER; note = 2'-O-methyl-guanosine-3'-phosphate
  modified_base 13: mod_base = OTHER; note = 2'-O-methyl-adenosine-3'-phosphate
  modified_base 14: mod_base = OTHER; note = 2'-O-methyl-adenosine-3'-phosphate
  modified_base 15: mod_base = OTHER; note = 2'-O-methyl-adenosine-3'-phosphate
  modified_base 16: mod_base = OTHER; note = 2'-O-methyl-cytidine-3'-phosphate
  modified_base 17: mod_base = OTHER; note = 2'-O-methyl-cytidine-3'-phosphate
  modified_base 18: mod_base = OTHER; note = 2'-O-methyl-uridine-3'-phosphate
  modified_base 19: mod_base = OTHER; note = 2'-O-methyl-adenosine-3'-phosphate
tttggaatcatgaaaccta

SEQ ID NO: 1873 - RNA, 19 nt, synthetic construct
  source 1..19: mol_type = other RNA
  modified_base 1: mod_base = OTHER; note = 2'-O-methyl-uridine-3'-phosphorothioate
  modified_base 2: mod_base = OTHER; note = 2'-O-methyl-uridine-3'-phosphorothioate
  modified_base 3: mod_base = OTHER; note = 2'-O-methyl-guanosine-3'-phosphate
  modified_base 4: mod_base = OTHER; note = 2'-O-methyl-guanosine-3'-phosphate
  modified_base 5: mod_base = OTHER; note = 2'-deoxy-2'-fluoro-adenosine-3'-phosphate
  modified_base 6: mod_base = OTHER; note = 2'-O-methyl-adenosine-3'-phosphate
  modified_base 7: mod_base = OTHER; note = 2'-deoxy-2'-fluoro-uridine-3'-phosphate
  modified_base 8: mod_base = OTHER; note = 2'-deoxy-2'-fluoro-cytidine-3'-phosphate
  modified_base 9: mod_base = OTHER; note = 2'-deoxy-2'-fluoro-adenosine-3'-phosphate
  modified_base 10: mod_base = OTHER; note = 2'-O-methyl-uridine-3'-phosphate
  modified_base 11: mod_base = OTHER; note = 2'-O-methyl-guanosine-3'-phosphate
  modified_base 12: mod_base = OTHER; note = 2'-O-methyl-adenosine-3'-phosphate
  modified_base 13: mod_base = OTHER; note = 2'-O-methyl-adenosine-3'-phosphate
  modified_base 14: mod_base = OTHER; note = 2'-O-methyl-adenosine-3'-phosphate
  modified_base 15: mod_base = OTHER; note = 2'-O-methyl-cytidine-3'-phosphate
  modified_base 16: mod_base = OTHER; note = 2'-O-methyl-cytidine-3'-phosphate
  modified_base 17: mod_base = OTHER; note = 2'-O-methyl-uridine-3'-phosphate
  modified_base 18: mod_base = OTHER; note = 2'-O-methyl-uridine-3'-phosphate
  modified_base 19: mod_base = OTHER; note = 2'-O-methyl-adenosine-3'-phosphate
ttggaatcatgaaacctta

SEQ ID NO: 1874 - RNA, 19 nt, synthetic construct
  source 1..19: mol_type = other RNA
  modified_base 1: mod_base = OTHER; note = 2'-O-methyl-adenosine-3'-phosphorothioate
  modified_base 2: mod_base = OTHER; note = 2'-O-methyl-adenosine-3'-phosphorothioate
  modified_base 3: mod_base = OTHER; note = 2'-O-methyl-guanosine-3'-phosphate
  modified_base 4: mod_base = OTHER; note = 2'-O-methyl-uridine-3'-phosphate
  modified_base 5: mod_base = OTHER; note = 2'-deoxy-2'-fluoro-adenosine-3'-phosphate
  modified_base 6: mod_base = OTHER; note = 2'-O-methyl-adenosine-3'-phosphate
  modified_base 7: mod_base = OTHER; note = 2'-deoxy-2'-fluoro-guanosine-3'-phosphate
  modified_base 8: mod_base = OTHER; note = 2'-deoxy-2'-fluoro-cytidine-3'-phosphate
  modified_base 9: mod_base = OTHER; note = 2'-deoxy-2'-fluoro-uridine-3'-phosphate
  modified_base 10: mod_base = OTHER; note = 2'-O-methyl-adenosine-3'-phosphate
  modified_base 11: mod_base = OTHER; note = 2'-O-methyl-guanosine-3'-phosphate
  modified_base 12: mod_base = OTHER; note = 2'-O-methyl-adenosine-3'-phosphate
  modified_base 13: mod_base = OTHER; note = 2'-O-methyl-guanosine-3'-phosphate
  modified_base 14: mod_base = OTHER; note = 2'-O-methyl-adenosine-3'-phosphate
  modified_base 15: mod_base = OTHER; note = 2'-O-methyl-adenosine-3'-phosphate
  modified_base 16: mod_base = OTHER; note = 2'-O-methyl-adenosine-3'-phosphate
  modified_base 17: mod_base = OTHER; note = 2'-O-methyl-adenosine-3'-phosphate
  modified_base 18: mod_base = OTHER; note = 2'-O-methyl-uridine-3'-phosphate
  modified_base 19: mod_base = OTHER; note = 2'-O-methyl-adenosine-3'-phosphate
aagtaagctagagaaaata

SEQ ID NO: 1875 - RNA, 19 nt, synthetic construct
  source 1..19: mol_type = other RNA
  modified_base 1: mod_base = OTHER; note = 2'-O-methyl-adenosine-3'-phosphorothioate
  modified_base 2: mod_base = OTHER; note = 2'-O-methyl-guanosine-3'-phosphorothioate
  modified_base 3: mod_base = OTHER; note = 2'-O-methyl-uridine-3'-phosphate
  modified_base 4: mod_base = OTHER; note = 2'-O-methyl-adenosine-3'-phosphate
  modified_base 5: mod_base = OTHER; note = 2'-deoxy-2'-fluoro-adenosine-3'-phosphate
  modified_base 6: mod_base = OTHER; note = 2'-O-methyl-guanosine-3'-phosphate
  modified_base 7: mod_base = OTHER; note = 2'-deoxy-2'-fluoro-cytidine-3'-phosphate
  modified_base 8: mod_base = OTHER; note = 2'-deoxy-2'-fluoro-uridine-3'-phosphate
  modified_base 9: mod_base = OTHER; note = 2'-deoxy-2'-fluoro-adenosine-3'-phosphate
  modified_base 10: mod_base = OTHER; note = 2'-O-methyl-guanosine-3'-phosphate
  modified_base 11: mod_base = OTHER; note = 2'-O-methyl-adenosine-3'-phosphate
  modified_base 12: mod_base = OTHER; note = 2'-O-methyl-guanosine-3'-phosphate
  modified_base 13: mod_base = OTHER; note = 2'-O-methyl-adenosine-3'-phosphate
  modified_base 14: mod_base = OTHER; note = 2'-O-methyl-adenosine-3'-phosphate
  modified_base 15: mod_base = OTHER; note = 2'-O-methyl-adenosine-3'-phosphate
  modified_base 16: mod_base = OTHER; note = 2'-O-methyl-adenosine-3'-phosphate
  modified_base 17: mod_base = OTHER; note = 2'-O-methyl-uridine-3'-phosphate
  modified_base 18: mod_base = OTHER; note = 2'-O-methyl-guanosine-3'-phosphate
  modified_base 19: mod_base = OTHER; note = 2'-O-methyl-adenosine-3'-phosphate
agtaagctagagaaaatga

SEQ ID NO: 1876 - RNA, 19 nt, synthetic construct
  source 1..19: mol_type = other RNA
  modified_base 1: mod_base = OTHER; note = 2'-O-methyl-guanosine-3'-phosphorothioate
  modified_base 2: mod_base = OTHER; note = 2'-O-methyl-uridine-3'-phosphorothioate
  modified_base 3: mod_base = OTHER; note = 2'-O-methyl-adenosine-3'-phosphate
  modified_base 4: mod_base = OTHER; note = 2'-O-methyl-adenosine-3'-phosphate
  modified_base 5: mod_base = OTHER; note = 2'-deoxy-2'-fluoro-guanosine-3'-phosphate
  modified_base 6: mod_base = OTHER; note = 2'-O-methyl-cytidine-3'-phosphate
  modified_base 7: mod_base = OTHER; note = 2'-deoxy-2'-fluoro-uridine-3'-phosphate
  modified_base 8: mod_base = OTHER; note = 2'-deoxy-2'-fluoro-adenosine-3'-phosphate
  modified_base 9: mod_base = OTHER; note = 2'-deoxy-2'-fluoro-guanosine-3'-phosphate
  modified_base 10: mod_base = OTHER; note = 2'-O-methyl-adenosine-3'-phosphate
  modified_base 11: mod_base = OTHER; note = 2'-O-methyl-guanosine-3'-phosphate
  modified_base 12: mod_base = OTHER; note = 2'-O-methyl-adenosine-3'-phosphate
  modified_base 13: mod_base = OTHER; note = 2'-O-methyl-adenosine-3'-phosphate
  modified_base 14: mod_base = OTHER; note = 2'-O-methyl-adenosine-3'-phosphate
  modified_base 15: mod_base = OTHER; note = 2'-O-methyl-adenosine-3'-phosphate
  modified_base 16: mod_base = OTHER; note = 2'-O-methyl-uridine-3'-phosphate
  modified_base 17: mod_base = OTHER; note = 2'-O-methyl-guanosine-3'-phosphate
  modified_base 18: mod_base = OTHER; note = 2'-O-methyl-uridine-3'-phosphate
  modified_base 19: mod_base = OTHER; note = 2'-O-methyl-adenosine-3'-phosphate
gtaagctagagaaaatgta

SEQ ID NO: 1877 - RNA, 19 nt, synthetic construct
  source 1..19: mol_type = other RNA
  modified_base 1: mod_base = OTHER; note = 2'-O-methyl-uridine-3'-phosphorothioate
  modified_base 2: mod_base = OTHER; note = 2'-O-methyl-uridine-3'-phosphorothioate
  modified_base 3: mod_base = OTHER; note = 2'-O-methyl-cytidine-3'-phosphate
  modified_base 4: mod_base = OTHER; note = 2'-O-methyl-adenosine-3'-phosphate
  modified_base 5: mod_base = OTHER; note = 2'-deoxy-2'-fluoro-uridine-3'-phosphate
  modified_base 6: mod_base = OTHER; note = 2'-O-methyl-uridine-3'-phosphate
  modified_base 7: mod_base = OTHER; note = 2'-deoxy-2'-fluoro-adenosine-3'-phosphate
  modified_base 8: mod_base = OTHER; note = 2'-deoxy-2'-fluoro-adenosine-3'-phosphate
  modified_base 9: mod_base = OTHER; note = 2'-deoxy-2'-fluoro-adenosine-3'-phosphate
  modified_base 10: mod_base = OTHER; note = 2'-O-methyl-uridine-3'-phosphate
  modified_base 11: mod_base = OTHER; note = 2'-O-methyl-guanosine-3'-phosphate
  modified_base 12: mod_base = OTHER; note = 2'-O-methyl-guanosine-3'-phosphate
  modified_base 13: mod_base = OTHER; note = 2'-O-methyl-adenosine-3'-phosphate
  modified_base 14: mod_base = OTHER; note = 2'-O-methyl-adenosine-3'-phosphate
  modified_base 15: mod_base = OTHER; note = 2'-O-methyl-guanosine-3'-phosphate
  modified_base 16: mod_base = OTHER; note = 2'-O-methyl-uridine-3'-phosphate
  modified_base 17: mod_base = OTHER; note = 2'-O-methyl-guanosine-3'-phosphate
  modified_base 18: mod_base = OTHER; note = 2'-O-methyl-guanosine-3'-phosphate
  modified_base 19: mod_base = OTHER; note = 2'-O-methyl-adenosine-3'-phosphate
ttcattaaatggaagtgga

SEQ ID NO: 1878 - RNA, 19 nt, synthetic construct
  source 1..19: mol_type = other RNA
  modified_base 1: mod_base = OTHER; note = 2'-O-methyl-adenosine-3'-phosphorothioate
  modified_base 2: mod_base = OTHER; note = 2'-O-methyl-adenosine-3'-phosphorothioate
  modified_base 3: mod_base = OTHER; note = 2'-O-methyl-guanosine-3'-phosphate
  modified_base 4: mod_base = OTHER; note = 2'-O-methyl-uridine-3'-phosphate
  modified_base 5: mod_base = OTHER; note = 2'-deoxy-2'-fluoro-cytidine-3'-phosphate
  modified_base 6: mod_base = OTHER; note = 2'-O-methyl-uridine-3'-phosphate
  modified_base 7: mod_base = OTHER; note = 2'-deoxy-2'-fluoro-uridine-3'-phosphate
  modified_base 8: mod_base = OTHER; note = 2'-deoxy-2'-fluoro-cytidine-3'-phosphate
  modified_base 9: mod_base = OTHER; note = 2'-deoxy-2'-fluoro-adenosine-3'-phosphate
  modified_base 10: mod_base = OTHER; note = 2'-O-methyl-uridine-3'-phosphate
  modified_base 11: mod_base = OTHER; note = 2'-O-methyl-uridine-3'-phosphate
  modified_base 12: mod_base = OTHER; note = 2'-O-methyl-cytidine-3'-phosphate
  modified_base 13: mod_base = OTHER; note = 2'-O-methyl-uridine-3'-phosphate
  modified_base 14: mod_base = OTHER; note = 2'-O-methyl-cytidine-3'-phosphate
  modified_base 15: mod_base = OTHER; note = 2'-O-methyl-adenosine-3'-phosphate
  modified_base 16: mod_base = OTHER; note = 2'-O-methyl-uridine-3'-phosphate
  modified_base 17: mod_base = OTHER; note = 2'-O-methyl-uridine-3'-phosphate
  modified_base 18: mod_base = OTHER; note = 2'-O-methyl-guanosine-3'-phosphate
  modified_base 19: mod_base = OTHER; note = 2'-O-methyl-adenosine-3'-phosphate
aagtcttcattctcattga

SEQ ID NO: 1879 - RNA, 19 nt, synthetic construct
  source 1..19: mol_type = other RNA
  modified_base 1: mod_base = OTHER; note = 2'-O-methyl-adenosine-3'-phosphorothioate
  modified_base 2: mod_base = OTHER; note = 2'-O-methyl-guanosine-3'-phosphorothioate
  modified_base 3: mod_base = OTHER; note = 2'-O-methyl-uridine-3'-phosphate
  modified_base 4: mod_base = OTHER; note = 2'-O-methyl-cytidine-3'-phosphate
  modified_base 5: mod_base = OTHER; note = 2'-deoxy-2'-fluoro-uridine-3'-phosphate
  modified_base 6: mod_base = OTHER; note = 2'-O-methyl-uridine-3'-phosphate
  modified_base 7: mod_base = OTHER; note = 2'-deoxy-2'-fluoro-cytidine-3'-phosphate
  modified_base 8: mod_base = OTHER; note = 2'-deoxy-2'-fluoro-adenosine-3'-phosphate
  modified_base 9: mod_base = OTHER; note = 2'-deoxy-2'-fluoro-uridine-3'-phosphate
  modified_base 10: mod_base = OTHER; note = 2'-O-methyl-uridine-3'-phosphate
  modified_base 11: mod_base = OTHER; note = 2'-O-methyl-cytidine-3'-phosphate
  modified_base 12: mod_base = OTHER; note = 2'-O-methyl-uridine-3'-phosphate
  modified_base 13: mod_base = OTHER; note = 2'-O-methyl-cytidine-3'-phosphate
  modified_base 14: mod_base = OTHER; note = 2'-O-methyl-adenosine-3'-phosphate
  modified_base 15: mod_base = OTHER; note = 2'-O-methyl-uridine-3'-phosphate
  modified_base 16: mod_base = OTHER; note = 2'-O-methyl-uridine-3'-phosphate
  modified_base 17: mod_base = OTHER; note = 2'-O-methyl-guanosine-3'-phosphate
  modified_base 18: mod_base = OTHER; note = 2'-O-methyl-uridine-3'-phosphate
  modified_base 19: mod_base = OTHER; note = 2'-O-methyl-adenosine-3'-phosphate
agtcttcattctcattgta

SEQ ID NO: 1880 - RNA, 19 nt, synthetic construct
  source 1..19: mol_type = other RNA
  modified_base 1: mod_base = OTHER; note = 2'-O-methyl-guanosine-3'-phosphorothioate
  modified_base 2: mod_base = OTHER; note = 2'-O-methyl-uridine-3'-phosphorothioate
  modified_base 3: mod_base = OTHER; note = 2'-O-methyl-cytidine-3'-phosphate
  modified_base 4: mod_base = OTHER; note = 2'-O-methyl-uridine-3'-phosphate
  modified_base 5: mod_base = OTHER; note = 2'-deoxy-2'-fluoro-uridine-3'-phosphate
  modified_base 6: mod_base = OTHER; note = 2'-O-methyl-cytidine-3'-phosphate
  modified_base 7: mod_base = OTHER; note = 2'-deoxy-2'-fluoro-adenosine-3'-phosphate
  modified_base 8: mod_base = OTHER; note = 2'-deoxy-2'-fluoro-uridine-3'-phosphate
  modified_base 9: mod_base = OTHER; note = 2'-deoxy-2'-fluoro-uridine-3'-phosphate
  modified_base 10: mod_base = OTHER; note = 2'-O-methyl-cytidine-3'-phosphate
  modified_base 11: mod_base = OTHER; note = 2'-O-methyl-uridine-3'-phosphate
  modified_base 12: mod_base = OTHER; note = 2'-O-methyl-cytidine-3'-phosphate
  modified_base 13: mod_base = OTHER; note = 2'-O-methyl-adenosine-3'-phosphate
  modified_base 14: mod_base = OTHER; note = 2'-O-methyl-uridine-3'-phosphate
  modified_base 15: mod_base = OTHER; note = 2'-O-methyl-uridine-3'-phosphate
  modified_base 16: mod_base = OTHER; note = 2'-O-methyl-guanosine-3'-phosphate
  modified_base 17: mod_base = OTHER; note = 2'-O-methyl-uridine-3'-phosphate
  modified_base 18: mod_base = OTHER; note = 2'-O-methyl-cytidine-3'-phosphate
  modified_base 19: mod_base = OTHER; note = 2'-O-methyl-adenosine-3'-phosphate
gtcttcattctcattgtca

SEQ ID NO: 1881 - RNA, 19 nt, synthetic construct
  source 1..19: mol_type = other RNA
  modified_base 1: mod_base = OTHER; note = 2'-O-methyl-uridine-3'-phosphorothioate
  modified_base 2: mod_base = OTHER; note = 2'-O-methyl-cytidine-3'-phosphorothioate
  modified_base 3: mod_base = OTHER; note = 2'-O-methyl-uridine-3'-phosphate
  modified_base 4: mod_base = OTHER; note = 2'-O-methyl-uridine-3'-phosphate
  modified_base 5: mod_base = OTHER; note = 2'-deoxy-2'-fluoro-cytidine-3'-phosphate
  modified_base 6: mod_base = OTHER; note = 2'-O-methyl-adenosine-3'-phosphate
  modified_base 7: mod_base = OTHER; note = 2'-deoxy-2'-fluoro-uridine-3'-phosphate
  modified_base 8: mod_base = OTHER; note = 2'-deoxy-2'-fluoro-uridine-3'-phosphate
  modified_base 9: mod_base = OTHER; note = 2'-deoxy-2'-fluoro-cytidine-3'-phosphate
  modified_base 10: mod_base = OTHER; note = 2'-O-methyl-uridine-3'-phosphate
  modified_base 11: mod_base = OTHER; note = 2'-O-methyl-cytidine-3'-phosphate
  modified_base 12: mod_base = OTHER; note = 2'-O-methyl-adenosine-3'-phosphate
  modified_base 13: mod_base = OTHER; note = 2'-O-methyl-uridine-3'-phosphate
  modified_base 14: mod_base = OTHER; note = 2'-O-methyl-uridine-3'-phosphate
  modified_base 15: mod_base = OTHER; note = 2'-O-methyl-guanosine-3'-phosphate
  modified_base 16: mod_base = OTHER; note = 2'-O-methyl-uridine-3'-phosphate
  modified_base 17: mod_base = OTHER; note = 2'-O-methyl-cytidine-3'-phosphate
  modified_base 18: mod_base = OTHER; note = 2'-O-methyl-uridine-3'-phosphate
  modified_base 19: mod_base = OTHER; note = 2'-O-methyl-adenosine-3'-phosphate
tcttcattctcattgtcta

SEQ ID NO: 1882 - RNA, 19 nt, synthetic construct
  source 1..19: mol_type = other RNA
  modified_base 1: mod_base = OTHER; note = 2'-O-methyl-cytidine-3'-phosphorothioate
  modified_base 2: mod_base = OTHER; note = 2'-O-methyl-uridine-3'-phosphorothioate
  modified_base 3: mod_base = OTHER; note = 2'-O-methyl-uridine-3'-phosphate
  modified_base 4: mod_base = OTHER; note = 2'-O-methyl-guanosine-3'-phosphate
  modified_base 5: mod_base = OTHER; note = 2'-deoxy-2'-fluoro-uridine-3'-phosphate
  modified_base 6: mod_base = OTHER; note = 2'-O-methyl-cytidine-3'-phosphate
  modified_base 7: mod_base = OTHER; note = 2'-deoxy-2'-fluoro-uridine-3'-phosphate
  modified_base 8: mod_base = OTHER; note = 2'-deoxy-2'-fluoro-uridine-3'-phosphate
  modified_base 9: mod_base = OTHER; note = 2'-deoxy-2'-fluoro-adenosine-3'-phosphate
  modified_base 10: mod_base = OTHER; note = 2'-O-methyl-guanosine-3'-phosphate
  modified_base 11: mod_base = OTHER; note = 2'-O-methyl-guanosine-3'-phosphate
  modified_base 12: mod_base = OTHER; note = 2'-O-methyl-guanosine-3'-phosphate
  modified_base 13: mod_base = OTHER; note = 2'-O-methyl-guanosine-3'-phosphate
  modified_base 14: mod_base = OTHER; note = 2'-O-methyl-uridine-3'-phosphate
  modified_base 15: mod_base = OTHER; note = 2'-O-methyl-guanosine-3'-phosphate
  modified_base 16: mod_base = OTHER; note = 2'-O-methyl-uridine-3'-phosphate
  modified_base 17: mod_base = OTHER; note = 2'-O-methyl-guanosine-3'-phosphate
  modified_base 18: mod_base = OTHER; note = 2'-O-methyl-guanosine-3'-phosphate
  modified_base 19: mod_base = OTHER; note = 2'-O-methyl-adenosine-3'-phosphate
cttgtcttaggggtgtgga

SEQ ID NO: 1883 - RNA, 19 nt, synthetic construct
  source 1..19: mol_type = other RNA
  modified_base 1: mod_base = OTHER; note = 2'-O-methyl-uridine-3'-phosphorothioate
  modified_base 2: mod_base = OTHER; note = 2'-O-methyl-adenosine-3'-phosphorothioate
  modified_base 3: mod_base = OTHER; note = 2'-O-methyl-uridine-3'-phosphate
  modified_base 4: mod_base = OTHER; note = 2'-O-methyl-uridine-3'-phosphate
  modified_base 5: mod_base = OTHER; note = 2'-deoxy-2'-fluoro-cytidine-3'-phosphate
  modified_base 6: mod_base = OTHER; note = 2'-O-methyl-adenosine-3'-phosphate
  modified_base 7: mod_base = OTHER; note = 2'-deoxy-2'-fluoro-uridine-3'-phosphate
  modified_base 8: mod_base = OTHER; note = 2'-deoxy-2'-fluoro-guanosine-3'-phosphate
  modified_base 9: mod_base = OTHER; note = 2'-deoxy-2'-fluoro-uridine-3'-phosphate
  modified_base 10: mod_base = OTHER; note = 2'-O-methyl-adenosine-3'-phosphate
  modified_base 11: mod_base = OTHER; note = 2'-O-methyl-uridine-3'-phosphate
  modified_base 12: mod_base = OTHER; note = 2'-O-methyl-adenosine-3'-phosphate
  modified_base 13: mod_base = OTHER; note = 2'-O-methyl-adenosine-3'-phosphate
  modified_base 14: mod_base = OTHER; note = 2'-O-methyl-guanosine-3'-phosphate
  modified_base 15: mod_base = OTHER; note = 2'-O-methyl-uridine-3'-phosphate
  modified_base 16: mod_base = OTHER; note = 2'-O-methyl-guanosine-3'-phosphate
  modified_base 17: mod_base = OTHER; note = 2'-O-methyl-guanosine-3'-phosphate
  modified_base 18: mod_base = OTHER; note = 2'-O-methyl-adenosine-3'-phosphate
  modified_base 19: mod_base = OTHER; note = 2'-O-methyl-adenosine-3'-phosphate
tattcatgtataagtggaa

SEQ ID NO: 1884 - RNA, 19 nt, synthetic construct
  source 1..19: mol_type = other RNA
  modified_base 1: mod_base = OTHER; note = 2'-O-methyl-uridine-3'-phosphorothioate
  modified_base 2: mod_base = OTHER; note = 2'-O-methyl-cytidine-3'-phosphorothioate
  modified_base 3: mod_base = OTHER; note = 2'-O-methyl-adenosine-3'-phosphate
  modified_base 4: mod_base = OTHER; note = 2'-O-methyl-uridine-3'-phosphate
  modified_base 5: mod_base = OTHER; note = 2'-deoxy-2'-fluoro-guanosine-3'-phosphate
  modified_base 6: mod_base = OTHER; note = 2'-O-methyl-uridine-3'-phosphate
  modified_base 7: mod_base = OTHER; note = 2'-deoxy-2'-fluoro-adenosine-3'-phosphate
  modified_base 8: mod_base = OTHER; note = 2'-deoxy-2'-fluoro-uridine-3'-phosphate
  modified_base 9: mod_base = OTHER; note = 2'-deoxy-2'-fluoro-adenosine-3'-phosphate
  modified_base 10: mod_base = OTHER; note = 2'-O-methyl-adenosine-3'-phosphate
  modified_base 11: mod_base = OTHER; note = 2'-O-methyl-guanosine-3'-phosphate
  modified_base 12: mod_base = OTHER; note = 2'-O-methyl-uridine-3'-phosphate
  modified_base 13: mod_base = OTHER; note = 2'-O-methyl-guanosine-3'-phosphate
  modified_base 14: mod_base = OTHER; note = 2'-O-methyl-guanosine-3'-phosphate
  modified_base 15: mod_base = OTHER; note = 2'-O-methyl-adenosine-3'-phosphate
  modified_base 16: mod_base = OTHER; note = 2'-O-methyl-cytidine-3'-phosphate
  modified_base 17: mod_base = OTHER; note = 2'-O-methyl-cytidine-3'-phosphate
  modified_base 18: mod_base = OTHER; note = 2'-O-methyl-cytidine-3'-phosphate
  modified_base 19: mod_base = OTHER; note = 2'-O-methyl-adenosine-3'-phosphate
tcatgtataagtggaccca

SEQ ID NO: 1885 - RNA, 21 nt, synthetic construct
  source 1..21: mol_type = other RNA
  modified_base 1: mod_base = OTHER; note = 2'-O-methyl-cytidine-3'-phosphorothioate
  modified_base 2: mod_base = OTHER; note = 2'-deoxy-2'-fluoro-guanosine-3'-phosphorothioate
  modified_base 3: mod_base = OTHER; note = 2'-O-methyl-adenosine-3'-phosphate
  modified_base 4: mod_base = OTHER; note = 2'-O-methyl-guanosine-3'-phosphate
  modified_base 5: mod_base = OTHER; note = 2'-O-methyl-uridine-3'-phosphate
  modified_base 6: mod_base = OTHER; note = 2'-deoxy-2'-fluoro-guanosine-3'-phosphate
  modified_base 7: mod_base = OTHER; note = 2'-O-methyl-adenosine-3'-phosphate
  modified_base 8: mod_base = OTHER; note = 2'-deoxy-2'-fluoro-guanosine-3'-phosphate
  modified_base 9: mod_base = OTHER; note = 2'-deoxy-2'-fluoro-guanosine-3'-phosphate
  modified_base 10: mod_base = OTHER; note = 2'-O-methyl-uridine-3'-phosphate
  modified_base 11: mod_base = OTHER; note = 2'-O-methyl-adenosine-3'-phosphate
  modified_base 12: mod_base = OTHER; note = 2'-O-methyl-uridine-3'-phosphate
  modified_base 13: mod_base = OTHER; note = 2'-O-methyl-uridine-3'-phosphate
  modified_base 14: mod_base = OTHER; note = 2'-deoxy-2'-fluoro-guanosine-3'-phosphate
  modified_base 15: mod_base = OTHER; note = 2'-O-methyl-guanosine-3'-phosphate
  modified_base 16: mod_base = OTHER; note = 2'-deoxy-2'-fluoro-adenosine-3'-phosphate
  modified_base 17: mod_base = OTHER; note = 2'-O-methyl-cytidine-3'-phosphate
  modified_base 18: mod_base = OTHER; note = 2'-O-methyl-uridine-3'-phosphate
  modified_base 19: mod_base = OTHER; note = 2'-O-methyl-uridine-3'-phosphorothioate
  modified_base 20: mod_base = OTHER; note = 2'-O-methyl-uridine-3'-phosphorothioate
  modified_base 21: mod_base = OTHER; note = 2'-O-methyl-uridine-3'-phosphate
cgagtgaggtattggactttt

SEQ ID NO: 1886 - RNA, 21 nt, synthetic construct
  source 1..21: mol_type = other RNA
  modified_base 1: mod_base = OTHER; note = 2'-O-methyl-guanosine-3'-phosphorothioate
  modified_base 2: mod_base = OTHER; note = 2'-deoxy-2'-fluoro-adenosine-3'-phosphorothioate
  modified_base 3: mod_base = OTHER; note = 2'-O-methyl-uridine-3'-phosphate
  modified_base 4: mod_base = OTHER; note = 2'-O-methyl-adenosine-3'-phosphate
  modified_base 5: mod_base = OTHER; note = 2'-O-methyl-uridine-3'-phosphate
  modified_base 6: mod_base = OTHER; note = 2'-deoxy-2'-fluoro-adenosine-3'-phosphate
  modified_base 7: mod_base = OTHER; note = 2'-O-methyl-guanosine-3'-phosphate
  modified_base 8: mod_base = OTHER; note = 2'-deoxy-2'-fluoro-uridine-3'-phosphate
  modified_base 9: mod_base = OTHER; note = 2'-deoxy-2'-fluoro-adenosine-3'-phosphate
  modified_base 10: mod_base = OTHER; note = 2'-O-methyl-uridine-3'-phosphate
  modified_base 11: mod_base = OTHER; note = 2'-O-methyl-guanosine-3'-phosphate
  modified_base 12: mod_base = OTHER; note = 2'-O-methyl-guanosine-3'-phosphate
  modified_base 13: mod_base = OTHER; note = 2'-O-methyl-uridine-3'-phosphate
  modified_base 14: mod_base = OTHER; note = 2'-deoxy-2'-fluoro-adenosine-3'-phosphate
  modified_base 15: mod_base = OTHER; note = 2'-O-methyl-adenosine-3'-phosphate
  modified_base 16: mod_base = OTHER; note = 2'-deoxy-2'-fluoro-guanosine-3'-phosphate
  modified_base 17: mod_base = OTHER; note = 2'-O-methyl-cytidine-3'-phosphate
  modified_base 18: mod_base = OTHER; note = 2'-O-methyl-uridine-3'-phosphate
  modified_base 19: mod_base = OTHER; note = 2'-O-methyl-adenosine-3'-phosphorothioate
  modified_base 20: mod_base = OTHER; note = 2'-O-methyl-uridine-3'-phosphorothioate
  modified_base 21: mod_base = OTHER; note = 2'-O-methyl-uridine-3'-phosphate
gatatagtatggtaagctatt

SEQ ID NO: 1887 - RNA, 21 nt, synthetic construct
  source 1..21: mol_type = other RNA
  modified_base 1: mod_base = OTHER; note = 2'-O-methyl-adenosine-3'-phosphorothioate
  modified_base 2: mod_base = OTHER; note = 2'-deoxy-2'-fluoro-adenosine-3'-phosphorothioate
  modified_base 3: mod_base = OTHER; note = 2'-O-methyl-guanosine-3'-phosphate
  modified_base 4: mod_base = OTHER; note = 2'-O-methyl-adenosine-3'-phosphate
  modified_base 5: mod_base = OTHER; note = 2'-O-methyl-uridine-3'-phosphate
  modified_base 6: mod_base = OTHER; note = 2'-deoxy-2'-fluoro-adenosine-3'-phosphate
  modified_base 7: mod_base = OTHER; note = 2'-O-methyl-uridine-3'-phosphate
  modified_base 8: mod_base = OTHER; note = 2'-deoxy-2'-fluoro-adenosine-3'-phosphate
  modified_base 9: mod_base = OTHER; note = 2'-deoxy-2'-fluoro-guanosine-3'-phosphate
  modified_base 10: mod_base = OTHER; note = 2'-O-methyl-uridine-3'-phosphate
  modified_base 11: mod_base = OTHER; note = 2'-O-methyl-adenosine-3'-phosphate
  modified_base 12: mod_base = OTHER; note = 2'-O-methyl-uridine-3'-phosphate
  modified_base 13: mod_base = OTHER; note = 2'-O-methyl-guanosine-3'-phosphate
  modified_base 14: mod_base = OTHER; note = 2'-deoxy-2'-fluoro-guanosine-3'-phosphate
  modified_base 15: mod_base = OTHER; note = 2'-O-methyl-uridine-3'-phosphate
  modified_base 16: mod_base = OTHER; note = 2'-deoxy-2'-fluoro-adenosine-3'-phosphate
  modified_base 17: mod_base = OTHER; note = 2'-O-methyl-adenosine-3'-phosphate
  modified_base 18: mod_base = OTHER; note = 2'-O-methyl-guanosine-3'-phosphate
  modified_base 19: mod_base = OTHER; note = 2'-O-methyl-cytidine-3'-phosphorothioate
  modified_base 20: mod_base = OTHER; note = 2'-O-methyl-uridine-3'-phosphorothioate
  modified_base 21: mod_base = OTHER; note = 2'-O-methyl-uridine-3'-phosphate
aagatatagtatggtaagctt

SEQ ID NO: 1888 - RNA, 21 nt, synthetic construct
  source 1..21: mol_type = other RNA
  modified_base 1: mod_base = OTHER; note = 2'-O-methyl-uridine-3'-phosphorothioate
  modified_base 2: mod_base = OTHER; note = 2'-deoxy-2'-fluoro-guanosine-3'-phosphorothioate
  modified_base 3: mod_base = OTHER; note = 2'-O-methyl-cytidine-3'-phosphate
  modified_base 4: mod_base = OTHER; note = 2'-O-methyl-guanosine-3'-phosphate
  modified_base 5: mod_base = OTHER; note = 2'-O-methyl-guanosine-3'-phosphate
  modified_base 6: mod_base = OTHER; note = 2'-deoxy-2'-fluoro-adenosine-3'-phosphate
  modified_base 7: mod_base = OTHER; note = 2'-O-methyl-cytidine-3'-phosphate
  modified_base 8: mod_base = OTHER; note = 2'-deoxy-2'-fluoro-cytidine-3'-phosphate
  modified_base 9: mod_base = OTHER; note = 2'-deoxy-2'-fluoro-cytidine-3'-phosphate
  modified_base 10: mod_base = OTHER; note = 2'-O-methyl-adenosine-3'-phosphate
  modified_base 11: mod_base = OTHER; note = 2'-O-methyl-cytidine-3'-phosphate
  modified_base 12: mod_base = OTHER; note = 2'-O-methyl-guanosine-3'-phosphate
  modified_base 13: mod_base = OTHER; note = 2'-O-methyl-adenosine-3'-phosphate
  modified_base 14: mod_base = OTHER; note = 2'-deoxy-2'-fluoro-adenosine-3'-phosphate
  modified_base 15: mod_base = OTHER; note = 2'-O-methyl-uridine-3'-phosphate
  modified_base 16: mod_base = OTHER; note = 2'-deoxy-2'-fluoro-uridine-3'-phosphate
  modified_base 17: mod_base = OTHER; note = 2'-O-methyl-guanosine-3'-phosphate
  modified_base 18: mod_base = OTHER; note = 2'-O-methyl-uridine-3'-phosphate
  modified_base 19: mod_base = OTHER; note = 2'-O-methyl-cytidine-3'-phosphorothioate
  modified_base 20: mod_base = OTHER; note = 2'-O-methyl-uridine-3'-phosphorothioate
  modified_base 21: mod_base = OTHER; note = 2'-O-methyl-uridine-3'-phosphate
tgcggacccacgaattgtctt

SEQ ID NO: 1889 - RNA, 21 nt, synthetic construct
  source 1..21: mol_type = other RNA
  modified_base 1: mod_base = OTHER; note = 2'-O-methyl-guanosine-3'-phosphorothioate
  modified_base 2: mod_base = OTHER; note = 2'-deoxy-2'-fluoro-guanosine-3'-phosphorothioate
  modified_base 3: mod_base = OTHER; note = 2'-O-methyl-cytidine-3'-phosphate
  modified_base 4: mod_base = OTHER; note = 2'-O-methyl-guanosine-3'-phosphate
  modified_base 5: mod_base = OTHER; note = 2'-O-methyl-uridine-3'-phosphate
  modified_base 6: mod_base = OTHER; note = 2'-deoxy-2'-fluoro-cytidine-3'-phosphate
  modified_base 7: mod_base = OTHER; note = 2'-O-methyl-adenosine-3'-phosphate
  modified_base 8: mod_base = OTHER; note = 2'-deoxy-2'-fluoro-cytidine-3'-phosphate
  modified_base 9: mod_base = OTHER; note = 2'-deoxy-2'-fluoro-uridine-3'-phosphate
  modified_base 10: mod_base = OTHER; note = 2'-O-methyl-uridine-3'-phosphate
  modified_base 11: mod_base = OTHER; note = 2'-O-methyl-adenosine-3'-phosphate
  modified_base 12: mod_base = OTHER; note = 2'-O-methyl-adenosine-3'-phosphate
  modified_base 13: mod_base = OTHER; note = 2'-O-methyl-guanosine-3'-phosphate
  modified_base 14: mod_base = OTHER; note = 2'-deoxy-2'-fluoro-adenosine-3'-phosphate
  modified_base 15: mod_base = OTHER; note = 2'-O-methyl-adenosine-3'-phosphate
  modified_base 16: mod_base = OTHER; note = 2'-deoxy-2'-fluoro-adenosine-3'-phosphate
  modified_base 17: mod_base = OTHER; note = 2'-O-methyl-uridine-3'-phosphate
  modified_base 18: mod_base = OTHER; note = 2'-O-methyl-cytidine-3'-phosphate
  modified_base 19: mod_base = OTHER; note = 2'-O-methyl-uridine-3'-phosphorothioate
  modified_base 20: mod_base = OTHER; note = 2'-O-methyl-uridine-3'-phosphorothioate
  modified_base 21: mod_base = OTHER; note = 2'-O-methyl-uridine-3'-phosphate
ggcgtcacttaagaaatcttt

SEQ ID NO: 1890 - RNA, 21 nt, synthetic construct
  source 1..21: mol_type = other RNA
  modified_base 1: mod_base = OTHER; note = 2'-O-methyl-adenosine-3'-phosphorothioate
  modified_base 2: mod_base = OTHER; note = 2'-deoxy-2'-fluoro-guanosine-3'-phosphorothioate
  modified_base 3: mod_base = OTHER; note = 2'-O-methyl-adenosine-3'-phosphate
  modified_base 4: mod_base = OTHER; note = 2'-O-methyl-uridine-3'-phosphate
  modified_base 5: mod_base = OTHER; note = 2'-O-methyl-guanosine-3'-phosphate
  modified_base 6: mod_base = OTHER; note = 2'-deoxy-2'-fluoro-adenosine-3'-phosphate
  modified_base 7: mod_base = OTHER; note = 2'-O-methyl-guanosine-3'-phosphate
  modified_base 8: mod_base = OTHER; note = 2'-deoxy-2'-fluoro-guanosine-3'-phosphate
  modified_base 9: mod_base = OTHER; note = 2'-deoxy-2'-fluoro-cytidine-3'-phosphate
  modified_base 10: mod_base = OTHER; note = 2'-O-methyl-guanosine-3'-phosphate
  modified_base 11: mod_base = OTHER; note = 2'-O-methyl-uridine-3'-phosphate
  modified_base 12: mod_base = OTHER; note = 2'-O-methyl-cytidine-3'-phosphate
  modified_base 13: mod_base = OTHER; note = 2'-O-methyl-adenosine-3'-phosphate
  modified_base 14: mod_base = OTHER; note = 2'-deoxy-2'-fluoro-cytidine-3'-phosphate
  modified_base 15: mod_base = OTHER; note = 2'-O-methyl-uridine-3'-phosphate
  modified_base 16: mod_base = OTHER; note = 2'-deoxy-2'-fluoro-uridine-3'-phosphate
  modified_base 17: mod_base = OTHER; note = 2'-O-methyl-adenosine-3'-phosphate
  modified_base 18: mod_base = OTHER; note = 2'-O-methyl-adenosine-3'-phosphate
  modified_base 19: mod_base = OTHER; note = 2'-O-methyl-guanosine-3'-phosphorothioate
  modified_base 20: mod_base = OTHER; note = 2'-O-methyl-uridine-3'-phosphorothioate
  modified_base 21: mod_base = OTHER; note = 2'-O-methyl-uridine-3'-phosphate
agatgaggcgtcacttaagtt

SEQ ID NO: 1891 - RNA, 21 nt, synthetic construct
  source 1..21: mol_type = other RNA
  modified_base 1: mod_base = OTHER; note = 2'-O-methyl-uridine-3'-phosphorothioate
  modified_base 2: mod_base = OTHER; note = 2'-deoxy-2'-fluoro-uridine-3'-phosphorothioate
  modified_base 3: mod_base = OTHER; note = 2'-O-methyl-guanosine-3'-phosphate
  modified_base 4: mod_base = OTHER; note = 2'-O-methyl-uridine-3'-phosphate
  modified_base 5: mod_base = OTHER; note = 2'-O-methyl-adenosine-3'-phosphate
  modified_base 6: mod_base = OTHER; note = 2'-deoxy-2'-fluoro-uridine-3'-phosphate
  modified_base 7: mod_base = OTHER; note = 2'-O-methyl-guanosine-3'-phosphate
  modified_base 8: mod_base = OTHER; note = 2'-deoxy-2'-fluoro-adenosine-3'-phosphate
  modified_base 9: mod_base = OTHER; note = 2'-deoxy-2'-fluoro-adenosine-3'-phosphate
  modified_base 10: mod_base = OTHER; note = 2'-O-methyl-guanosine-3'-phosphate
  modified_base 11: mod_base = OTHER; note = 2'-O-methyl-uridine-3'-phosphate
  modified_base 12: mod_base = OTHER; note = 2'-O-methyl-cytidine-3'-phosphate
  modified_base 13: mod_base = OTHER; note = 2'-O-methyl-uridine-3'-phosphate
  modified_base 14: mod_base = OTHER; note = 2'-deoxy-2'-fluoro-uridine-3'-phosphate
  modified_base 15: mod_base = OTHER; note = 2'-O-methyl-adenosine-3'-phosphate
  modified_base 16: mod_base = OTHER; note = 2'-deoxy-2'-fluoro-cytidine-3'-phosphate
  modified_base 17: mod_base = OTHER; note = 2'-O-methyl-guanosine-3'-phosphate
  modified_base 18: mod_base = OTHER; note = 2'-O-methyl-guanosine-3'-phosphate
  modified_base 19: mod_base = OTHER; note = 2'-O-methyl-guanosine-3'-phosphorothioate
  modified_base 20: mod_base = OTHER; note = 2'-O-methyl-uridine-3'-phosphorothioate
  modified_base 21: mod_base = OTHER; note = 2'-O-methyl-uridine-3'-phosphate
ttgtatgaagtcttacgggtt

SEQ ID NO: 1892 - RNA, 21 nt, synthetic construct
  source 1..21: mol_type = other RNA
  modified_base 1: mod_base = OTHER; note = 2'-O-methyl-cytidine-3'-phosphorothioate
  modified_base 2: mod_base = OTHER; note = 2'-deoxy-2'-fluoro-uridine-3'-phosphorothioate
  modified_base 3: mod_base = OTHER; note = 2'-O-methyl-cytidine-3'-phosphate
  modified_base 4: mod_base = OTHER; note = 2'-O-methyl-uridine-3'-phosphate
  modified_base 5: mod_base = OTHER; note = 2'-O-methyl-uridine-3'-phosphate
  modified_base 6: mod_base = OTHER; note = 2'-deoxy-2'-fluoro-cytidine-3'-phosphate
  modified_base 7: mod_base = OTHER; note = 2'-O-methyl-uridine-3'-phosphate
  modified_base 8: mod_base = OTHER; note = 2'-deoxy-2'-fluoro-uridine-3'-phosphate
  modified_base 9: mod_base = OTHER; note = 2'-deoxy-2'-fluoro-adenosine-3'-phosphate
  modified_base 10: mod_base = OTHER; note = 2'-O-methyl-uridine-3'-phosphate
  modified_base 11: mod_base = OTHER; note = 2'-O-methyl-adenosine-3'-phosphate
  modified_base 12: mod_base = OTHER; note = 2'-O-methyl-guanosine-3'-phosphate
  modified_base 13: mod_base = OTHER; note = 2'-O-methyl-cytidine-3'-phosphate
  modified_base 14: mod_base = OTHER; note = 2'-deoxy-2'-fluoro-uridine-3'-phosphate
  modified_base 15: mod_base = OTHER; note = 2'-O-methyl-guanosine-3'-phosphate
  modified_base 16: mod_base = OTHER; note = 2'-deoxy-2'-fluoro-adenosine-3'-phosphate
  modified_base 17: mod_base = OTHER; note = 2'-O-methyl-guanosine-3'-phosphate
  modified_base 18: mod_base = OTHER; note = 2'-O-methyl-cytidine-3'-phosphate
  modified_base 19: mod_base = OTHER; note = 2'-O-methyl-guanosine-3'-phosphorothioate
  modified_base 20: mod_base = OTHER; note = 2'-O-methyl-uridine-3'-phosphorothioate
  modified_base 21: mod_base = OTHER; note = 2'-O-methyl-uridine-3'-phosphate
ctcttcttatagctgagcgtt

SEQ ID NO: 1893 - RNA, 21 nt, synthetic construct
  source 1..21: mol_type = other RNA
  modified_base 1: mod_base = OTHER; note = 2'-O-methyl-adenosine-3'-phosphorothioate
  modified_base 2: mod_base = OTHER; note = 2'-deoxy-2'-fluoro-adenosine-3'-phosphorothioate
  modified_base 3: mod_base = OTHER; note = 2'-O-methyl-guanosine-3'-phosphate
  modified_base 4: mod_base = OTHER; note = 2'-O-methyl-cytidine-3'-phosphate
  modified_base 5: mod_base = OTHER; note = 2'-O-methyl-adenosine-3'-phosphate
  modified_base 6: mod_base = OTHER; note = 2'-deoxy-2'-fluoro-uridine-3'-phosphate
  modified_base 7: mod_base = OTHER; note = 2'-O-methyl-cytidine-3'-phosphate
  modified_base 8: mod_base = OTHER; note = 2'-deoxy-2'-fluoro-adenosine-3'-phosphate
  modified_base 9: mod_base = OTHER; note = 2'-deoxy-2'-fluoro-cytidine-3'-phosphate
  modified_base 10: mod_base = OTHER; note = 2'-O-methyl-guanosine-3'-phosphate
  modified_base 11: mod_base = OTHER; note = 2'-O-methyl-adenosine-3'-phosphate
  modified_base 12: mod_base = OTHER; note = 2'-O-methyl-uridine-3'-phosphate
  modified_base 13: mod_base = OTHER; note = 2'-O-methyl-guanosine-3'-phosphate
  modified_base 14: mod_base = OTHER; note = 2'-deoxy-2'-fluoro-adenosine-3'-phosphate
  modified_base 15: mod_base = OTHER; note = 2'-O-methyl-uridine-3'-phosphate
  modified_base 16: mod_base = OTHER; note = 2'-deoxy-2'-fluoro-adenosine-3'-phosphate
  modified_base 17: mod_base = OTHER; note = 2'-O-methyl-cytidine-3'-phosphate
  modified_base 18: mod_base = OTHER; note = 2'-O-methyl-adenosine-3'-phosphate
  modified_base 19: mod_base = OTHER; note = 2'-O-methyl-guanosine-3'-phosphorothioate
  modified_base 20: mod_base = OTHER; note = 2'-O-methyl-uridine-3'-phosphorothioate
  modified_base 21: mod_base = OTHER; note = 2'-O-methyl-uridine-3'-phosphate
aagcatcacgatgatacagtt

SEQ ID NO: 1894 - RNA, 21 nt, synthetic construct
  source 1..21: mol_type = other RNA
  modified_base 1: mod_base = OTHER; note = 2'-O-methyl-guanosine-3'-phosphorothioate
  modified_base 2: mod_base = OTHER; note = 2'-deoxy-2'-fluoro-adenosine-3'-phosphorothioate
  modified_base 3: mod_base = OTHER; note = 2'-O-methyl-adenosine-3'-phosphate
  modified_base 4: mod_base = OTHER; note = 2'-O-methyl-guanosine-3'-phosphate
  modified_base 5: mod_base = OTHER; note = 2'-O-methyl-cytidine-3'-phosphate
  modified_base 6: mod_base = OTHER; note = 2'-deoxy-2'-fluoro-adenosine-3'-phosphate
  modified_base 7: mod_base = OTHER; note = 2'-O-methyl-uridine-3'-phosphate
  modified_base 8: mod_base = OTHER; note = 2'-deoxy-2'-fluoro-cytidine-3'-phosphate
  modified_base 9: mod_base = OTHER; note = 2'-deoxy-2'-fluoro-adenosine-3'-phosphate
  modified_base 10: mod_base = OTHER; note = 2'-O-methyl-cytidine-3'-phosphate
  modified_base 11: mod_base = OTHER; note = 2'-O-methyl-guanosine-3'-phosphate
  modified_base 12: mod_base = OTHER; note = 2'-O-methyl-adenosine-3'-phosphate
  modified_base 13: mod_base = OTHER; note = 2'-O-methyl-uridine-3'-phosphate
  modified_base 14: mod_base = OTHER; note = 2'-deoxy-2'-fluoro-guanosine-3'-phosphate
  modified_base 15: mod_base = OTHER; note = 2'-O-methyl-adenosine-3'-phosphate
  modified_base 16: mod_base = OTHER; note = 2'-deoxy-2'-fluoro-uridine-3'-phosphate
  modified_base 17: mod_base = OTHER; note = 2'-O-methyl-adenosine-3'-phosphate
  modified_base 18: mod_base = OTHER; note = 2'-O-methyl-cytidine-3'-phosphate
  modified_base 19: mod_base = OTHER; note = 2'-O-methyl-adenosine-3'-phosphorothioate
  modified_base 20: mod_base = OTHER; note = 2'-O-methyl-uridine-3'-phosphorothioate
  modified_base 21: mod_base = OTHER; note = 2'-O-methyl-uridine-3'-phosphate
gaagcatcacgatgatacatt

SEQ ID NO: 1895 - RNA, 21 nt, synthetic construct
  source 1..21: mol_type = other RNA
  modified_base 1: mod_base = OTHER; note = 2'-O-methyl-adenosine-3'-phosphorothioate
  modified_base 2: mod_base = OTHER; note = 2'-deoxy-2'-fluoro-guanosine-3'-phosphorothioate
  modified_base 3: mod_base = OTHER; note = 2'-O-methyl-uridine-3'-phosphate
  modified_base 4: mod_base = OTHER; note = 2'-O-methyl-adenosine-3'-phosphate
  modified_base 5: mod_base = OTHER; note = 2'-O-methyl-uridine-3'-phosphate
  modified_base 6: mod_base = OTHER; note = 2'-deoxy-2'-fluoro-adenosine-3'-phosphate
  modified_base 7: mod_base = OTHER; note = 2'-O-methyl-uridine-3'-phosphate
  modified_base 8: mod_base = OTHER; note = 2'-deoxy-2'-fluoro-uridine-3'-phosphate
  modified_base 9: mod_base = OTHER; note = 2'-deoxy-2'-fluoro-adenosine-3'-phosphate
  modified_base 10: mod_base = OTHER; note = 2'-O-methyl-guanosine-3'-phosphate
  modified_base 11: mod_base = OTHER; note = 2'-O-methyl-uridine-3'-phosphate
  modified_base 12: mod_base = OTHER; note = 2'-O-methyl-guanosine-3'-phosphate
  modified_base 13: mod_base = OTHER; note = 2'-O-methyl-adenosine-3'-phosphate
  modified_base 14: mod_base = OTHER; note = 2'-deoxy-2'-fluoro-uridine-3'-phosphate
  modified_base 15: mod_base = OTHER; note = 2'-O-methyl-adenosine-3'-phosphate
  modified_base 16: mod_base = OTHER; note = 2'-deoxy-2'-fluoro-uridine-3'-phosphate
  modified_base 17: mod_base = OTHER; note = 2'-O-methyl-guanosine-3'-phosphate
  modified_base 18: mod_base = OTHER; note = 2'-O-methyl-adenosine-3'-phosphate
  modified_base 19: mod_base = OTHER; note = 2'-O-methyl-cytidine-3'-phosphorothioate
  modified_base 20: mod_base = OTHER; note = 2'-O-methyl-uridine-3'-phosphorothioate
  modified_base 21: mod_base = OTHER; note = 2'-O-methyl-uridine-3'-phosphate
agtatattagtgatatgactt

SEQ ID NO: 1896 - RNA, 21 nt, synthetic construct
  source 1..21: mol_type = other RNA
  modified_base 1: mod_base = OTHER; note = 2'-O-methyl-uridine-3'-phosphorothioate
  modified_base 2: mod_base = OTHER; note = 2'-deoxy-2'-fluoro-adenosine-3'-phosphorothioate
  modified_base 3: mod_base = OTHER; note = 2'-O-methyl-uridine-3'-phosphate
  modified_base 4: mod_base = OTHER; note = 2'-O-methyl-guanosine-3'-phosphate
  modified_base 5: mod_base = OTHER; note = 2'-O-methyl-guanosine-3'-phosphate
  modified_base 6: mod_base = OTHER; note = 2'-deoxy-2'-fluoro-uridine-3'-phosphate
  modified_base 7: mod_base = OTHER; note = 2'-O-methyl-adenosine-3'-phosphate
  modified_base 8: mod_base = OTHER; note = 2'-deoxy-2'-fluoro-adenosine-3'-phosphate
  modified_base 9: mod_base = OTHER; note = 2'-deoxy-2'-fluoro-guanosine-3'-phosphate
  modified_base 10: mod_base = OTHER; note = 2'-O-methyl-cytidine-3'-phosphate
  modified_base 11: mod_base = OTHER; note = 2'-O-methyl-uridine-3'-phosphate
  modified_base 12: mod_base = OTHER; note = 2'-O-methyl-adenosine-3'-phosphate
  modified_base 13: mod_base = OTHER; note = 2'-O-methyl-guanosine-3'-phosphate
  modified_base 14: mod_base = OTHER; note = 2'-deoxy-2'-fluoro-guanosine-3'-phosphate
  modified_base 15: mod_base = OTHER; note = 2'-O-methyl-uridine-3'-phosphate
  modified_base 16: mod_base = OTHER; note = 2'-deoxy-2'-fluoro-adenosine-3'-phosphate
  modified_base 17: mod_base = OTHER; note = 2'-O-methyl-adenosine-3'-phosphate
  modified_base 18: mod_base = OTHER; note = 2'-O-methyl-cytidine-3'-phosphate
  modified_base 19: mod_base = OTHER; note = 2'-O-methyl-uridine-3'-phosphorothioate
  modified_base 20: mod_base = OTHER; note = 2'-O-methyl-uridine-3'-phosphorothioate
  modified_base 21: mod_base = OTHER; note = 2'-O-methyl-uridine-3'-phosphate
tatggtaagctaggtaacttt

SEQ ID NO: 1897 - RNA, 21 nt, synthetic construct
  source 1..21: mol_type = other RNA
  modified_base 1: mod_base = OTHER; note = 2'-O-methyl-guanosine-3'-phosphorothioate
  modified_base 2: mod_base = OTHER; note = 2'-deoxy-2'-fluoro-guanosine-3'-phosphorothioate
  modified_base 3: mod_base = OTHER; note = 2'-O-methyl-cytidine-3'-phosphate
  modified_base 4: mod_base = OTHER; note = 2'-O-methyl-uridine-3'-phosphate
  modified_base 5: mod_base = OTHER; note = 2'-O-methyl-adenosine-3'-phosphate
  modified_base 6: mod_base = OTHER; note = 2'-deoxy-2'-fluoro-uridine-3'-phosphate
  modified_base 7: mod_base = OTHER; note = 2'-O-methyl-uridine-3'-phosphate
  modified_base 8: mod_base = OTHER; note = 2'-deoxy-2'-fluoro-adenosine-3'-phosphate
  modified_base 9: mod_base = OTHER; note = 2'-deoxy-2'-fluoro-guanosine-3'-phosphate
  modified_base 10: mod_base = OTHER; note = 2'-O-methyl-guanosine-3'-phosphate
  modified_base 11: mod_base = OTHER; note = 2'-O-methyl-uridine-3'-phosphate
  modified_base 12: mod_base = OTHER; note = 2'-O-methyl-adenosine-3'-phosphate
  modified_base 13: mod_base = OTHER; note = 2'-O-methyl-guanosine-3'-phosphate
  modified_base 14: mod_base = OTHER; note = 2'-deoxy-2'-fluoro-uridine-3'-phosphate
  modified_base 15: mod_base = OTHER; note = 2'-O-methyl-uridine-3'-phosphate
  modified_base 16: mod_base = OTHER; note = 2'-deoxy-2'-fluoro-adenosine-3'-phosphate
  modified_base 17: mod_base = OTHER; note = 2'-O-methyl-adenosine-3'-phosphate
  modified_base 18: mod_base = OTHER; note = 2'-O-methyl-guanosine-3'-phosphate
  modified_base 19: mod_base = OTHER; note = 2'-O-methyl-adenosine-3'-phosphorothioate
  modified_base 20: mod_base = OTHER; note = 2'-O-methyl-uridine-3'-phosphorothioate
  modified_base 21: mod_base = OTHER; note = 2'-O-methyl-uridine-3'-phosphate
ggctattaggtagttaagatt

SEQ ID NO: 1898 - RNA, 21 nt, synthetic construct
  source 1..21: mol_type = other RNA
  modified_base 1: mod_base = OTHER; note = 2'-O-methyl-adenosine-3'-phosphorothioate
  modified_base 2: mod_base = OTHER; note = 2'-deoxy-2'-fluoro-guanosine-3'-phosphorothioate
  modified_base 3: mod_base = OTHER; note = 2'-O-methyl-guanosine-3'-phosphate
  modified_base 4: mod_base = OTHER; note = 2'-O-methyl-cytidine-3'-phosphate
  modified_base 5: mod_base = OTHER; note = 2'-O-methyl-uridine-3'-phosphate
  modified_base 6: mod_base = OTHER; note = 2'-deoxy-2'-fluoro-adenosine-3'-phosphate
  modified_base 7: mod_base = OTHER; note = 2'-O-methyl-uridine-3'-phosphate
  modified_base 8: mod_base = OTHER; note = 2'-deoxy-2'-fluoro-uridine-3'-phosphate
  modified_base 9: mod_base = OTHER; note = 2'-deoxy-2'-fluoro-adenosine-3'-phosphate
  modified_base 10: mod_base = OTHER; note = 2'-O-methyl-guanosine-3'-phosphate
  modified_base 11: mod_base = OTHER; note = 2'-O-methyl-guanosine-3'-phosphate
  modified_base 12: mod_base = OTHER; note = 2'-O-methyl-uridine-3'-phosphate
  modified_base 13: mod_base = OTHER; note = 2'-O-methyl-adenosine-3'-phosphate
  modified_base 14: mod_base = OTHER; note = 2'-deoxy-2'-fluoro-guanosine-3'-phosphate
  modified_base 15: mod_base = OTHER; note = 2'-O-methyl-uridine-3'-phosphate
  modified_base 16: mod_base = OTHER; note = 2'-deoxy-2'-fluoro-uridine-3'-phosphate
  modified_base 17: mod_base = OTHER; note = 2'-O-methyl-adenosine-3'-phosphate
  modified_base 18: mod_base = OTHER; note = 2'-O-methyl-adenosine-3'-phosphate
  modified_base 19: mod_base = OTHER; note = 2'-O-methyl-guanosine-3'-phosphorothioate
  modified_base 20: mod_base = OTHER; note = 2'-O-methyl-uridine-3'-phosphorothioate
  modified_base 21: mod_base = OTHER; note = 2'-O-methyl-uridine-3'-phosphate
aggctattaggtagttaagtt

SEQ ID NO: 1899 - RNA, 21 nt, synthetic construct
  source 1..21: mol_type = other RNA
  modified_base 1: mod_base = OTHER; note = 2'-O-methyl-uridine-3'-phosphorothioate
  modified_base 2: mod_base = OTHER; note = 2'-deoxy-2'-fluoro-adenosine-3'-phosphorothioate
  modified_base 3: mod_base = OTHER; note = 2'-O-methyl-cytidine-3'-phosphate
  modified_base 4: mod_base = OTHER; note = 2'-O-methyl-cytidine-3'-phosphate
  modified_base 5: mod_base = OTHER; note = 2'-O-methyl-adenosine-3'-phosphate
  modified_base 6: mod_base = OTHER; note = 2'-deoxy-2'-fluoro-uridine-3'-phosphate
  modified_base 7: mod_base = OTHER; note = 2'-O-methyl-uridine-3'-phosphate
  modified_base 8: mod_base = OTHER; note = 2'-deoxy-2'-fluoro-uridine-3'-phosphate
  modified_base 9: mod_base = OTHER; note = 2'-deoxy-2'-fluoro-guanosine-3'-phosphate
  modified_base 10: mod_base = OTHER; note = 2'-O-methyl-guanosine-3'-phosphate
  modified_base 11: mod_base = OTHER; note = 2'-O-methyl-uridine-3'-phosphate
  modified_base 12: mod_base = OTHER; note = 2'-O-methyl-uridine-3'-phosphate
  modified_base 13: mod_base = OTHER; note = 2'-O-methyl-guanosine-3'-phosphate
  modified_base 14: mod_base = OTHER; note = 2'-deoxy-2'-fluoro-adenosine-3'-phosphate
  modified_base 15: mod_base = OTHER; note = 2'-O-methyl-uridine-3'-phosphate
  modified_base 16: mod_base = OTHER; note = 2'-deoxy-2'-fluoro-adenosine-3'-phosphate
  modified_base 17: mod_base = OTHER; note = 2'-O-methyl-guanosine-3'-phosphate
  modified_base 18: mod_base = OTHER; note = 2'-O-methyl-adenosine-3'-phosphate
  modified_base 19: mod_base = OTHER; note = 2'-O-methyl-guanosine-3'-phosphorothioate
  modified_base 20: mod_base = OTHER; note = 2'-O-methyl-uridine-3'-phosphorothioate
  modified_base 21: mod_base = OTHER; note = 2'-O-methyl-uridine-3'-phosphate
taccatttggttgatagagtt

SEQ ID NO: 1900 - RNA, 21 nt, synthetic construct
  source 1..21: mol_type = other RNA
  modified_base 1: mod_base = OTHER; note = 2'-O-methyl-guanosine-3'-phosphorothioate
  modified_base 2: mod_base = OTHER; note = 2'-deoxy-2'-fluoro-adenosine-3'-phosphorothioate
  modified_base 3: mod_base = OTHER; note = 2'-O-methyl-uridine-3'-phosphate
  modified_base 4: mod_base = OTHER; note = 2'-O-methyl-guanosine-3'-phosphate
  modified_base 5: mod_base = OTHER; note = 2'-O-methyl-cytidine-3'-phosphate
  modified_base 6: mod_base = OTHER; note = 2'-deoxy-2'-fluoro-uridine-3'-phosphate
  modified_base 7: mod_base = OTHER; note = 2'-O-methyl-uridine-3'-phosphate
  modified_base 8: mod_base = OTHER; note = 2'-deoxy-2'-fluoro-adenosine-3'-phosphate
  modified_base 9: mod_base = OTHER; note = 2'-deoxy-2'-fluoro-cytidine-3'-phosphate
  modified_base 10: mod_base = OTHER; note = 2'-O-methyl-cytidine-3'-phosphate
  modified_base 11: mod_base = OTHER; note = 2'-O-methyl-adenosine-3'-phosphate
  modified_base 12: mod_base = OTHER; note = 2'-O-methyl-uridine-3'-phosphate
  modified_base 13: mod_base = OTHER; note = 2'-O-methyl-uridine-3'-phosphate
  modified_base 14: mod_base = OTHER; note = 2'-deoxy-2'-fluoro-uridine-3'-phosphate
  modified_base 15: mod_base = OTHER; note = 2'-O-methyl-guanosine-3'-phosphate
  modified_base 16: mod_base = OTHER; note = 2'-deoxy-2'-fluoro-guanosine-3'-phosphate
  modified_base 17: mod_base = OTHER; note = 2'-O-methyl-uridine-3'-phosphate
  modified_base 18: mod_base = OTHER; note = 2'-O-methyl-uridine-3'-phosphate
  modified_base 19: mod_base = OTHER; note = 2'-O-methyl-guanosine-3'-phosphorothioate
  modified_base 20: mod_base = OTHER; note = 2'-O-methyl-uridine-3'-phosphorothioate
  modified_base 21: mod_base = OTHER; note = 2'-O-methyl-uridine-3'-phosphate
gatgcttaccatttggttgtt

SEQ ID NO: 1901 - RNA, 21 nt, synthetic construct
  source 1..21: mol_type = other RNA
  modified_base 1: mod_base = OTHER; note = 2'-O-methyl-adenosine-3'-phosphorothioate
  modified_base 2: mod_base = OTHER; note = 2'-deoxy-2'-fluoro-uridine-3'-phosphorothioate
  modified_base 3: mod_base = OTHER; note = 2'-O-methyl-adenosine-3'-phosphate
  modified_base 4: mod_base = OTHER; note = 2'-O-methyl-adenosine-3'-phosphate
  modified_base 5: mod_base = OTHER; note = 2'-O-methyl-uridine-3'-phosphate
  modified_base 6: mod_base = OTHER; note = 2'-deoxy-2'-fluoro-uridine-3'-phosphate
  modified_base 7: mod_base = OTHER; note = 2'-O-methyl-uridine-3'-phosphate
  modified_base 8: mod_base = OTHER; note = 2'-deoxy-2'-fluoro-adenosine-3'-phosphate
  modified_base 9: mod_base = OTHER; note = 2'-deoxy-2'-fluoro-guanosine-3'-phosphate
  modified_base 10: mod_base = OTHER; note = 2'-O-methyl-cytidine-3'-phosphate
  modified_base 11: mod_base = OTHER; note = 2'-O-methyl-uridine-3'-phosphate
  modified_base 12: mod_base = OTHER; note = 2'-O-methyl-cytidine-3'-phosphate
  modified_base 13: mod_base = OTHER; note = 2'-O-methyl-adenosine-3'-phosphate
  modified_base 14: mod_base = OTHER; note = 2'-deoxy-2'-fluoro-guanosine-3'-phosphate
  modified_base 15: mod_base = OTHER; note = 2'-O-methyl-uridine-3'-phosphate
  modified_base 16: mod_base = OTHER; note = 2'-deoxy-2'-fluoro-adenosine-3'-phosphate
  modified_base 17: mod_base = OTHER; note = 2'-O-methyl-guanosine-3'-phosphate
  modified_base 18: mod_base = OTHER; note = 2'-O-methyl-adenosine-3'-phosphate
  modified_base 19: mod_base = OTHER; note = 2'-O-methyl-guanosine-3'-phosphorothioate
  modified_base 20: mod_base = OTHER; note = 2'-O-methyl-uridine-3'-phosphorothioate
  modified_base 21: mod_base = OTHER; note = 2'-O-methyl-uridine-3'-phosphate
ataatttagctcagtagagtt

SEQ ID NO: 1902 - RNA, 21 nt, synthetic construct
  source 1..21: mol_type = other RNA
  modified_base 1: mod_base = OTHER; note = 2'-O-methyl-uridine-3'-phosphorothioate
  modified_base 2: mod_base = OTHER; note = 2'-deoxy-2'-fluoro-adenosine-3'-phosphorothioate
  modified_base 3: mod_base = OTHER; note = 2'-O-methyl-uridine-3'-phosphate
  modified_base 4: mod_base = OTHER; note = 2'-O-methyl-adenosine-3'-phosphate
  modified_base 5: mod_base = OTHER; note = 2'-O-methyl-adenosine-3'-phosphate
  modified_base 6: mod_base = OTHER; note = 2'-deoxy-2'-fluoro-uridine-3'-phosphate
  modified_base 7: mod_base = OTHER; note = 2'-O-methyl-uridine-3'-phosphate
  modified_base 8: mod_base = OTHER; note = 2'-deoxy-2'-fluoro-uridine-3'-phosphate
  modified_base 9: mod_base = OTHER; note = 2'-deoxy-2'-fluoro-adenosine-3'-phosphate
  modified_base 10: mod_base = OTHER; note = 2'-O-methyl-guanosine-3'-phosphate
  modified_base 11: mod_base = OTHER; note = 2'-O-methyl-cytidine-3'-phosphate
  modified_base 12: mod_base = OTHER; note = 2'-O-methyl-uridine-3'-phosphate
  modified_base 13: mod_base = OTHER; note = 2'-O-methyl-cytidine-3'-phosphate
  modified_base 14: mod_base = OTHER; note = 2'-deoxy-2'-fluoro-adenosine-3'-phosphate
  modified_base 15: mod_base = OTHER; note = 2'-O-methyl-guanosine-3'-phosphate
  modified_base 16: mod_base = OTHER; note = 2'-deoxy-2'-fluoro-uridine-3'-phosphate
  modified_base 17: mod_base = OTHER; note = 2'-O-methyl-adenosine-3'-phosphate
  modified_base 18: mod_base = OTHER; note = 2'-O-methyl-guanosine-3'-phosphate
  modified_base 19: mod_base = OTHER; note = 2'-O-methyl-adenosine-3'-phosphorothioate
  modified_base 20: mod_base = OTHER; note = 2'-O-methyl-uridine-3'-phosphorothioate
  modified_base 21: mod_base = OTHER; note = 2'-O-methyl-uridine-3'-phosphate
tataatttagctcagtagatt

SEQ ID NO: 1903 - RNA, 21 nt, synthetic construct
  source 1..21: mol_type = other RNA
  modified_base 1: mod_base = OTHER; note = 2'-O-methyl-guanosine-3'-phosphorothioate
  modified_base 2: mod_base = OTHER; note = 2'-deoxy-2'-fluoro-cytidine-3'-phosphorothioate
  modified_base 3: mod_base = OTHER; note = 2'-O-methyl-uridine-3'-phosphate
  modified_base 4: mod_base = OTHER; note = 2'-O-methyl-guanosine-3'-phosphate
  modified_base 5: mod_base = OTHER; note = 2'-O-methyl-guanosine-3'-phosphate
  modified_base 6: mod_base = OTHER; note = 2'-deoxy-2'-fluoro-adenosine-3'-phosphate
  modified_base 7: mod_base = OTHER; note = 2'-O-methyl-uridine-3'-phosphate
  modified_base 8: mod_base = OTHER; note = 2'-deoxy-2'-fluoro-cytidine-3'-phosphate
  modified_base 9: mod_base = OTHER; note = 2'-deoxy-2'-fluoro-uridine-3'-phosphate
  modified_base 10: mod_base = OTHER; note = 2'-O-methyl-adenosine-3'-phosphate
  modified_base 11: mod_base = OTHER; note = 2'-O-methyl-uridine-3'-phosphate
  modified_base 12: mod_base = OTHER; note = 2'-O-methyl-adenosine-3'-phosphate
  modified_base 13: mod_base = OTHER; note = 2'-O-methyl-adenosine-3'-phosphate
  modified_base 14: mod_base = OTHER; note = 2'-deoxy-2'-fluoro-uridine-3'-phosphate
  modified_base 15: mod_base = OTHER; note = 2'-O-methyl-uridine-3'-phosphate
  modified_base 16: mod_base = OTHER; note = 2'-deoxy-2'-fluoro-uridine-3'-phosphate
  modified_base 17: mod_base = OTHER; note = 2'-O-methyl-adenosine-3'-phosphate
  modified_base 18: mod_base = OTHER; note = 2'-O-methyl-guanosine-3'-phosphate
  modified_base 19: mod_base = OTHER; note = 2'-O-methyl-cytidine-3'-phosphorothioate
  modified_base 20: mod_base = OTHER; note = 2'-O-methyl-uridine-3'-phosphorothioate
  modified_base 21: mod_base = OTHER; note = 2'-O-methyl-uridine-3'-phosphate
gctggatctataatttagctt

SEQ ID NO: 1904 - RNA, 21 nt, synthetic construct
  source 1..21: mol_type = other RNA
  modified_base 1: mod_base = OTHER; note = 2'-O-methyl-guanosine-3'-phosphorothioate
  modified_base 2: mod_base = OTHER; note = 2'-deoxy-2'-fluoro-adenosine-3'-phosphorothioate
  modified_base 3: mod_base = OTHER; note = 2'-O-methyl-guanosine-3'-phosphate
  modified_base 4: mod_base = OTHER; note = 2'-O-methyl-uridine-3'-phosphate
  modified_base 5: mod_base = OTHER; note = 2'-O-methyl-uridine-3'-phosphate
  modified_base 6: mod_base = OTHER; note = 2'-deoxy-2'-fluoro-adenosine-3'-phosphate
  modified_base 7: mod_base = OTHER; note = 2'-O-methyl-guanosine-3'-phosphate
  modified_base 8: mod_base = OTHER; note = 2'-deoxy-2'-fluoro-cytidine-3'-phosphate
  modified_base 9: mod_base = OTHER; note = 2'-deoxy-2'-fluoro-adenosine-3'-phosphate
  modified_base 10: mod_base = OTHER; note = 2'-O-methyl-adenosine-3'-phosphate
  modified_base 11: mod_base = OTHER; note = 2'-O-methyl-cytidine-3'-phosphate
  modified_base 12: mod_base = OTHER; note = 2'-O-methyl-adenosine-3'-phosphate
  modified_base 13: mod_base = OTHER; note = 2'-O-methyl-cytidine-3'-phosphate
  modified_base 14: mod_base = OTHER; note = 2'-deoxy-2'-fluoro-uridine-3'-phosphate
  modified_base 15: mod_base = OTHER; note = 2'-O-methyl-uridine-3'-phosphate
  modified_base 16: mod_base = OTHER; note = 2'-deoxy-2'-fluoro-guanosine-3'-phosphate
  modified_base 17: mod_base = OTHER; note = 2'-O-methyl-uridine-3'-phosphate
  modified_base 18: mod_base = OTHER; note = 2'-O-methyl-guanosine-3'-phosphate
  modified_base 19: mod_base = OTHER; note = 2'-O-methyl-uridine-3'-phosphorothioate
  modified_base 20: mod_base = OTHER; note = 2'-O-methyl-uridine-3'-phosphorothioate
  modified_base 21: mod_base = OTHER; note = 2'-O-methyl-uridine-3'-phosphate
gagttagcaacacttgtgttt

SEQ ID NO: 1905 - RNA, 21 nt, synthetic construct
  source 1..21: mol_type = other RNA
  modified_base 1: mod_base = OTHER; note = 2'-O-methyl-uridine-3'-phosphorothioate
  modified_base 2: mod_base = OTHER; note = 2'-deoxy-2'-fluoro-cytidine-3'-phosphorothioate
  modified_base 3: mod_base = OTHER; note = 2'-O-methyl-adenosine-3'-phosphate
  modified_base 4: mod_base = OTHER; note = 2'-O-methyl-cytidine-3'-phosphate
  modified_base 5: mod_base = OTHER; note = 2'-O-methyl-uridine-3'-phosphate
  modified_base 6: mod_base = OTHER; note = 2'-deoxy-2'-fluoro-adenosine-3'-phosphate
  modified_base 7: mod_base = OTHER; note = 2'-O-methyl-uridine-3'-phosphate
  modified_base 8: mod_base = OTHER; note = 2'-deoxy-2'-fluoro-uridine-3'-phosphate
  modified_base 9: mod_base = OTHER; note = 2'-deoxy-2'-fluoro-guanosine-3'-phosphate
  modified_base 10: mod_base = OTHER; note = 2'-O-methyl-adenosine-3'-phosphate
  modified_base 11: mod_base = OTHER; note = 2'-O-methyl-guanosine-3'-phosphate
  modified_base 12: mod_base = OTHER; note = 2'-O-methyl-uridine-3'-phosphate
  modified_base 13: mod_base = OTHER; note = 2'-O-methyl-uridine-3'-phosphate
  modified_base 14: mod_base = OTHER; note = 2'-deoxy-2'-fluoro-adenosine-3'-phosphate
  modified_base 15: mod_base = OTHER; note = 2'-O-methyl-guanosine-3'-phosphate
  modified_base 16: mod_base = OTHER; note = 2'-deoxy-2'-fluoro-cytidine-3'-phosphate
  modified_base 17: mod_base = OTHER; note = 2'-O-methyl-adenosine-3'-phosphate
  modified_base 18: mod_base = OTHER; note = 2'-O-methyl-adenosine-3'-phosphate
  modified_base 19: mod_base = OTHER; note = 2'-O-methyl-cytidine-3'-phosphorothioate
  modified_base 20: mod_base = OTHER; note = 2'-O-methyl-uridine-3'-phosphorothioate
  modified_base 21: mod_base = OTHER; note = 2'-O-methyl-uridine-3'-phosphate
tcactattgagttagcaactt

SEQ ID NO: 1906 - RNA, 21 nt, synthetic construct
  source 1..21: mol_type = other RNA
  modified_base 1: mod_base = OTHER; note = 2'-O-methyl-adenosine-3'-phosphorothioate
  modified_base 2: mod_base = OTHER; note = 2'-deoxy-2'-fluoro-guanosine-3'-phosphorothioate
  modified_base 3: mod_base = OTHER; note = 2'-O-methyl-guanosine-3'-phosphate
  modified_base 4: mod_base = OTHER; note = 2'-O-methyl-cytidine-3'-phosphate
  modified_base 5: mod_base = OTHER; note = 2'-O-methyl-guanosine-3'-phosphate
  modified_base 6: mod_base = OTHER; note = 2'-deoxy-2'-fluoro-uridine-3'-phosphate
  modified_base 7: mod_base = OTHER; note = 2'-O-methyl-cytidine-3'-phosphate
  modified_base 8: mod_base = OTHER; note = 2'-deoxy-2'-fluoro-adenosine-3'-phosphate
  modified_base 9: mod_base = OTHER; note = 2'-deoxy-2'-fluoro-cytidine-3'-phosphate
  modified_base 10: mod_base = OTHER; note = 2'-O-methyl-uridine-3'-phosphate
  modified_base 11: mod_base = OTHER; note = 2'-O-methyl-uridine-3'-phosphate
  modified_base 12: mod_base = OTHER; note = 2'-O-methyl-adenosine-3'-phosphate
  modified_base 13: mod_base = OTHER; note = 2'-O-methyl-adenosine-3'-phosphate
  modified_base 14: mod_base = OTHER; note = 2'-deoxy-2'-fluoro-guanosine-3'-phosphate
  modified_base 15: mod_base = OTHER; note = 2'-O-methyl-adenosine-3'-phosphate
  modified_base 16: mod_base = OTHER; note = 2'-deoxy-2'-fluoro-adenosine-3'-phosphate
  modified_base 17: mod_base = OTHER; note = 2'-O-methyl-adenosine-3'-phosphate
  modified_base 18: mod_base = OTHER; note = 2'-O-methyl-uridine-3'-phosphate
  modified_base 19: mod_base = OTHER; note = 2'-O-methyl-cytidine-3'-phosphorothioate
  modified_base 20: mod_base = OTHER; note = 2'-O-methyl-uridine-3'-phosphorothioate
  modified_base 21: mod_base = OTHER; note = 2'-O-methyl-uridine-3'-phosphate
aggcgtcacttaagaaatctt

SEQ ID NO: 1907 - RNA, 21 nt, synthetic construct
  source 1..21: mol_type = other RNA
  modified_base 1: mod_base = OTHER; note = 2'-O-methyl-guanosine-3'-phosphorothioate
  modified_base 2: mod_base = OTHER; note = 2'-deoxy-2'-fluoro-adenosine-3'-phosphorothioate
  modified_base 3: mod_base = OTHER; note = 2'-O-methyl-uridine-3'-phosphate
  modified_base 4: mod_base = OTHER; note = 2'-O-methyl-guanosine-3'-phosphate
  modified_base 5: mod_base = OTHER; note = 2'-O-methyl-adenosine-3'-phosphate
  modified_base 6: mod_base = OTHER; note = 2'-deoxy-2'-fluoro-guanosine-3'-phosphate
  modified_base 7: mod_base = OTHER; note = 2'-O-methyl-guanosine-3'-phosphate
  modified_base 8: mod_base = OTHER; note = 2'-deoxy-2'-fluoro-cytidine-3'-phosphate
  modified_base 9: mod_base = OTHER; note = 2'-deoxy-2'-fluoro-guanosine-3'-phosphate
  modified_base 10: mod_base = OTHER; note = 2'-O-methyl-uridine-3'-phosphate
  modified_base 11: mod_base = OTHER; note = 2'-O-methyl-cytidine-3'-phosphate
  modified_base 12: mod_base = OTHER; note = 2'-O-methyl-adenosine-3'-phosphate
  modified_base 13: mod_base = OTHER; note = 2'-O-methyl-cytidine-3'-phosphate
  modified_base 14: mod_base = OTHER; note = 2'-deoxy-2'-fluoro-uridine-3'-phosphate
  modified_base 15: mod_base = OTHER; note = 2'-O-methyl-uridine-3'-phosphate
  modified_base 16: mod_base = OTHER; note = 2'-deoxy-2'-fluoro-adenosine-3'-phosphate
  modified_base 17: mod_base = OTHER; note = 2'-O-methyl-adenosine-3'-phosphate
  modified_base 18: mod_base = OTHER; note = 2'-O-methyl-guanosine-3'-phosphate
  modified_base 19: mod_base = OTHER; note = 2'-O-methyl-adenosine-3'-phosphorothioate
  modified_base 20: mod_base = OTHER; note = 2'-O-methyl-uridine-3'-phosphorothioate
  modified_base 21: mod_base = OTHER; note = 2'-O-methyl-uridine-3'-phosphate
gatgaggcgtcacttaagatt

SEQ ID NO: 1908 - RNA, 21 nt, synthetic construct
  source 1..21: mol_type = other RNA
  modified_base 1: mod_base = OTHER; note = 2'-O-methyl-uridine-3'-phosphorothioate
  modified_base 2: mod_base = OTHER; note = 2'-deoxy-2'-fluoro-adenosine-3'-phosphorothioate
  modified_base 3: mod_base = OTHER; note = 2'-O-methyl-guanosine-3'-phosphate
  modified_base 4: mod_base = OTHER; note = 2'-O-methyl-adenosine-3'-phosphate
  modified_base 5: mod_base = OTHER; note = 2'-O-methyl-uridine-3'-phosphate
  modified_base 6: mod_base = OTHER; note = 2'-deoxy-2'-fluoro-guanosine-3'-phosphate
  modified_base 7: mod_base = OTHER; note = 2'-O-methyl-adenosine-3'-phosphate
  modified_base 8: mod_base = OTHER; note = 2'-deoxy-2'-fluoro-guanosine-3'-phosphate
  modified_base 9: mod_base = OTHER; note = 2'-deoxy-2'-fluoro-guanosine-3'-phosphate
  modified_base 10: mod_base = OTHER; note = 2'-O-methyl-cytidine-3'-phosphate
  modified_base 11: mod_base = OTHER; note = 2'-O-methyl-guanosine-3'-phosphate
  modified_base 12: mod_base = OTHER; note = 2'-O-methyl-uridine-3'-phosphate
  modified_base 13: mod_base = OTHER; note = 2'-O-methyl-cytidine-3'-phosphate
  modified_base 14: mod_base = OTHER; note = 2'-deoxy-2'-fluoro-adenosine-3'-phosphate
  modified_base 15: mod_base = OTHER; note = 2'-O-methyl-cytidine-3'-phosphate
  modified_base 16: mod_base = OTHER; note = 2'-deoxy-2'-fluoro-uridine-3'-phosphate
  modified_base 17: mod_base = OTHER; note = 2'-O-methyl-uridine-3'-phosphate
  modified_base 18: mod_base = OTHER; note = 2'-O-methyl-adenosine-3'-phosphate
  modified_base 19: mod_base = OTHER; note = 2'-O-methyl-adenosine-3'-phosphorothioate
  modified_base 20: mod_base = OTHER; note = 2'-O-methyl-uridine-3'-phosphorothioate
  modified_base 21: mod_base = OTHER; note = 2'-O-methyl-uridine-3'-phosphate
tagatgaggcgtcacttaatt

SEQ ID NO: 1909 - RNA, 21 nt, synthetic construct
  source 1..21: mol_type = other RNA
  modified_base 1: mod_base = OTHER; note = 2'-O-methyl-guanosine-3'-phosphorothioate
  modified_base 2: mod_base = OTHER; note = 2'-deoxy-2'-fluoro-uridine-3'-phosphorothioate
  modified_base 3: mod_base = OTHER; note = 2'-O-methyl-uridine-3'-phosphate
  modified_base 4: mod_base = OTHER; note = 2'-O-methyl-guanosine-3'-phosphate
  modified_base 5: mod_base = OTHER; note = 2'-O-methyl-adenosine-3'-phosphate
  modified_base 6: mod_base = OTHER; note = 2'-deoxy-2'-fluoro-guanosine-3'-phosphate
  modified_base 7: mod_base = OTHER; note = 2'-O-methyl-guanosine-3'-phosphate
  modified_base 8: mod_base = OTHER; note = 2'-deoxy-2'-fluoro-cytidine-3'-phosphate
  modified_base 9: mod_base = OTHER; note = 2'-deoxy-2'-fluoro-uridine-3'-phosphate
  modified_base 10: mod_base = OTHER; note = 2'-O-methyl-cytidine-3'-phosphate
  modified_base 11: mod_base = OTHER; note = 2'-O-methyl-uridine-3'-phosphate
  modified_base 12: mod_base = OTHER; note = 2'-O-methyl-uridine-3'-phosphate
  modified_base 13: mod_base = OTHER; note = 2'-O-methyl-cytidine-3'-phosphate
  modified_base 14: mod_base = OTHER; note = 2'-deoxy-2'-fluoro-uridine-3'-phosphate
  modified_base 15: mod_base = OTHER; note = 2'-O-methyl-uridine-3'-phosphate
  modified_base 16: mod_base = OTHER; note = 2'-deoxy-2'-fluoro-adenosine-3'-phosphate
  modified_base 17: mod_base = OTHER; note = 2'-O-methyl-uridine-3'-phosphate
  modified_base 18: mod_base = OTHER; note = 2'-O-methyl-adenosine-3'-phosphate
  modified_base 19: mod_base = OTHER; note = 2'-O-methyl-guanosine-3'-phosphorothioate
  modified_base 20: mod_base = OTHER; note = 2'-O-methyl-uridine-3'-phosphorothioate
  modified_base 21: mod_base = OTHER; note = 2'-O-methyl-uridine-3'-phosphate
gttgaggctcttcttatagtt

SEQ ID NO: 1910 - RNA, 21 nt, synthetic construct
  source 1..21: mol_type = other RNA
  modified_base 1: mod_base = OTHER; note = 2'-O-methyl-guanosine-3'-phosphorothioate
  modified_base 2: mod_base = OTHER; note = 2'-deoxy-2'-fluoro-guanosine-3'-phosphorothioate
  modified_base 3: mod_base = OTHER; note = 2'-O-methyl-uridine-3'-phosphate
  modified_base 4: mod_base = OTHER; note = 2'-O-methyl-uridine-3'-phosphate
  modified_base 5: mod_base = OTHER; note = 2'-O-methyl-guanosine-3'-phosphate
  modified_base 6: mod_base = OTHER; note = 2'-deoxy-2'-fluoro-adenosine-3'-phosphate
  modified_base 7: mod_base = OTHER; note = 2'-O-methyl-guanosine-3'-phosphate
  modified_base 8: mod_base = OTHER; note = 2'-deoxy-2'-fluoro-guanosine-3'-phosphate
  modified_base 9: mod_base = OTHER; note = 2'-deoxy-2'-fluoro-cytidine-3'-phosphate
  modified_base 10: mod_base = OTHER; note = 2'-O-methyl-uridine-3'-phosphate
  modified_base 11: mod_base = OTHER; note = 2'-O-methyl-cytidine-3'-phosphate
  modified_base 12: mod_base = OTHER; note = 2'-O-methyl-uridine-3'-phosphate
  modified_base 13: mod_base = OTHER; note = 2'-O-methyl-uridine-3'-phosphate
  modified_base 14: mod_base = OTHER; note = 2'-deoxy-2'-fluoro-cytidine-3'-phosphate
  modified_base 15: mod_base = OTHER; note = 2'-O-methyl-uridine-3'-phosphate
  modified_base 16: mod_base = OTHER; note = 2'-deoxy-2'-fluoro-uridine-3'-phosphate
  modified_base 17: mod_base = OTHER; note = 2'-O-methyl-adenosine-3'-phosphate
  modified_base 18: mod_base = OTHER; note = 2'-O-methyl-uridine-3'-phosphate
  modified_base 19: mod_base = OTHER; note = 2'-O-methyl-adenosine-3'-phosphorothioate
  modified_base 20: mod_base = OTHER; note = 2'-O-methyl-uridine-3'-phosphorothioate
  modified_base 21: mod_base = OTHER; note = 2'-O-methyl-uridine-3'-phosphate
ggttgaggctcttcttatatt

SEQ ID NO: 1911 - RNA, 21 nt, synthetic construct
  source 1..21: mol_type = other RNA
  modified_base 1: mod_base = OTHER; note = 2'-O-methyl-uridine-3'-phosphorothioate
  modified_base 2: mod_base = OTHER; note = 2'-deoxy-2'-fluoro-guanosine-3'-phosphorothioate
  modified_base 3: mod_base = OTHER; note = 2'-O-methyl-guanosine-3'-phosphate
  modified_base 4: mod_base = OTHER; note = 2'-O-methyl-uridine-3'-phosphate
  modified_base 5: mod_base = OTHER; note = 2'-O-methyl-uridine-3'-phosphate
  modified_base 6: mod_base = OTHER; note = 2'-deoxy-2'-fluoro-guanosine-3'-phosphate
  modified_base 7: mod_base = OTHER; note = 2'-O-methyl-adenosine-3'-phosphate
  modified_base 8: mod_base = OTHER; note = 2'-deoxy-2'-fluoro-guanosine-3'-phosphate
  modified_base 9: mod_base = OTHER; note = 2'-deoxy-2'-fluoro-guanosine-3'-phosphate
  modified_base 10: mod_base = OTHER; note = 2'-O-methyl-cytidine-3'-phosphate
  modified_base 11: mod_base = OTHER; note = 2'-O-methyl-uridine-3'-phosphate
  modified_base 12: mod_base = OTHER; note = 2'-O-methyl-cytidine-3'-phosphate
  modified_base 13: mod_base = OTHER; note = 2'-O-methyl-uridine-3'-phosphate
  modified_base 14: mod_base = OTHER; note = 2'-deoxy-2'-fluoro-uridine-3'-phosphate
  modified_base 15: mod_base = OTHER; note = 2'-O-methyl-cytidine-3'-phosphate
  modified_base 16: mod_base = OTHER; note = 2'-deoxy-2'-fluoro-uridine-3'-phosphate
  modified_base 17: mod_base = OTHER; note = 2'-O-methyl-uridine-3'-phosphate
  modified_base 18: mod_base = OTHER; note = 2'-O-methyl-adenosine-3'-phosphate
  modified_base 19: mod_base = OTHER; note = 2'-O-methyl-uridine-3'-phosphorothioate
  modified_base 20: mod_base = OTHER; note = 2'-O-methyl-uridine-3'-phosphorothioate
  modified_base 21: mod_base = OTHER; note = 2'-O-methyl-uridine-3'-phosphate
tggttgaggctcttcttattt

SEQ ID NO: 1912 - RNA, 21 nt, synthetic construct
  source 1..21: mol_type = other RNA
  modified_base 1: mod_base = OTHER; note = 2'-O-methyl-uridine-3'-phosphorothioate
  modified_base 2: mod_base = OTHER; note = 2'-deoxy-2'-fluoro-adenosine-3'-phosphorothioate
  modified_base 3: mod_base = OTHER; note = 2'-O-methyl-guanosine-3'-phosphate
  modified_base 4: mod_base = OTHER; note = 2'-O-methyl-cytidine-3'-phosphate
  modified_base 5: mod_base = OTHER; note = 2'-O-methyl-uridine-3'-phosphate
  modified_base 6: mod_base = OTHER; note = 2'-deoxy-2'-fluoro-uridine-3'-phosphate
  modified_base 7: mod_base = OTHER; note = 2'-O-methyl-uridine-3'-phosphate
  modified_base 8: mod_base = OTHER; note = 2'-deoxy-2'-fluoro-uridine-3'-phosphate
  modified_base 9: mod_base = OTHER; note = 2'-deoxy-2'-fluoro-guanosine-3'-phosphate
  modified_base 10: mod_base = OTHER; note = 2'-O-methyl-adenosine-3'-phosphate
  modified_base 11: mod_base = OTHER; note = 2'-O-methyl-cytidine-3'-phosphate
  modified_base 12: mod_base = OTHER; note = 2'-O-methyl-guanosine-3'-phosphate
  modified_base 13: mod_base = OTHER; note = 2'-O-methyl-uridine-3'-phosphate
  modified_base 14: mod_base = OTHER; note = 2'-deoxy-2'-fluoro-guanosine-3'-phosphate
  modified_base 15: mod_base = OTHER; note = 2'-O-methyl-cytidine-3'-phosphate
  modified_base 16: mod_base = OTHER; note = 2'-deoxy-2'-fluoro-uridine-3'-phosphate
  modified_base 17: mod_base = OTHER; note = 2'-O-methyl-uridine-3'-phosphate
  modified_base 18: mod_base = OTHER; note = 2'-O-methyl-guanosine-3'-phosphate
  modified_base 19: mod_base = OTHER; note = 2'-O-methyl-uridine-3'-phosphorothioate
  modified_base 20: mod_base = OTHER; note = 2'-O-methyl-uridine-3'-phosphorothioate
  modified_base 21: mod_base = OTHER; note = 2'-O-methyl-uridine-3'-phosphate
tagcttttgacgtgcttgttt

SEQ ID NO: 1913 - RNA, 21 nt, synthetic construct
  source 1..21: mol_type = other RNA
  modified_base 1: mod_base = OTHER; note = 2'-O-methyl-uridine-3'-phosphorothioate
  modified_base 2: mod_base = OTHER; note = 2'-deoxy-2'-fluoro-guanosine-3'-phosphorothioate
  modified_base 3: mod_base = OTHER; note = 2'-O-methyl-adenosine-3'-phosphate
  modified_base 4: mod_base = OTHER; note = 2'-O-methyl-uridine-3'-phosphate
  modified_base 5: mod_base = OTHER; note = 2'-O-methyl-adenosine-3'-phosphate
  modified_base 6: mod_base = OTHER; note = 2'-deoxy-2'-fluoro-adenosine-3'-phosphate
  modified_base 7: mod_base = OTHER; note = 2'-O-methyl-adenosine-3'-phosphate
  modified_base 8: mod_base = OTHER; note = 2'-deoxy-2'-fluoro-uridine-3'-phosphate
  modified_base 9: mod_base = OTHER; note = 2'-deoxy-2'-fluoro-adenosine-3'-phosphate
  modified_base 10: mod_base = OTHER; note = 2'-O-methyl-guanosine-3'-phosphate
  modified_base 11: mod_base = OTHER; note = 2'-O-methyl-adenosine-3'-phosphate
  modified_base 12: mod_base = OTHER; note = 2'-O-methyl-uridine-3'-phosphate
  modified_base 13: mod_base = OTHER; note = 2'-O-methyl-uridine-3'-phosphate
  modified_base 14: mod_base = OTHER; note = 2'-deoxy-2'-fluoro-cytidine-3'-phosphate
  modified_base 15: mod_base = OTHER; note = 2'-O-methyl-uridine-3'-phosphate
  modified_base 16: mod_base = OTHER; note = 2'-deoxy-2'-fluoro-guanosine-3'-phosphate
  modified_base 17: mod_base = OTHER; note = 2'-O-methyl-uridine-3'-phosphate
  modified_base 18: mod_base = OTHER; note = 2'-O-methyl-adenosine-3'-phosphate
  modified_base 19: mod_base = OTHER; note = 2'-O-methyl-guanosine-3'-phosphorothioate
  modified_base 20: mod_base = OTHER; note = 2'-O-methyl-uridine-3'-phosphorothioate
  modified_base 21: mod_base = OTHER; note = 2'-O-methyl-uridine-3'-phosphate
tgataaatagattctgtagtt

SEQ ID NO: 1914 - RNA, 21 nt, synthetic construct
  source 1..21: mol_type = other RNA
  modified_base 1: mod_base = OTHER; note = 2'-O-methyl-uridine-3'-phosphorothioate
  modified_base 2: mod_base = OTHER; note = 2'-deoxy-2'-fluoro-uridine-3'-phosphorothioate
  modified_base 3: mod_base = OTHER; note = 2'-O-methyl-guanosine-3'-phosphate
  modified_base 4: mod_base = OTHER; note = 2'-O-methyl-uridine-3'-phosphate
  modified_base 5: mod_base = OTHER; note = 2'-O-methyl-uridine-3'-phosphate
  modified_base 6: mod_base = OTHER; note = 2'-deoxy-2'-fluoro-guanosine-3'-phosphate
  modified_base 7: mod_base = OTHER; note = 2'-O-methyl-guanosine-3'-phosphate
  modified_base 8: mod_base = OTHER; note = 2'-deoxy-2'-fluoro-cytidine-3'-phosphate
  modified_base 9: mod_base = OTHER; note = 2'-deoxy-2'-fluoro-adenosine-3'-phosphate
  modified_base 10: mod_base = OTHER; note = 2'-O-methyl-guanosine-3'-phosphate
  modified_base 11: mod_base = OTHER; note = 2'-O-methyl-uridine-3'-phosphate
  modified_base 12: mod_base = OTHER; note = 2'-O-methyl-guanosine-3'-phosphate
  modified_base 13: mod_base = OTHER; note = 2'-O-methyl-cytidine-3'-phosphate
  modified_base 14: mod_base = OTHER; note = 2'-deoxy-2'-fluoro-adenosine-3'-phosphate
  modified_base 15: mod_base = OTHER; note = 2'-O-methyl-guanosine-3'-phosphate
  modified_base 16: mod_base = OTHER; note = 2'-deoxy-2'-fluoro-uridine-3'-phosphate
  modified_base 17: mod_base = OTHER; note = 2'-O-methyl-uridine-3'-phosphate
  modified_base 18: mod_base = OTHER; note = 2'-O-methyl-uridine-3'-phosphate
  modified_base 19: mod_base = OTHER; note = 2'-O-methyl-uridine-3'-phosphorothioate
  modified_base 20: mod_base = OTHER; note = 2'-O-methyl-uridine-3'-phosphorothioate
  modified_base 21: mod_base = OTHER; note = 2'-O-methyl-uridine-3'-phosphate
ttgttggcagtgcagtttttt

SEQ ID NO: 1915 - RNA, 21 nt, synthetic construct
  source 1..21: mol_type = other RNA
  modified_base 1: mod_base = OTHER; note = 2'-O-methyl-cytidine-3'-phosphorothioate
  modified_base 2: mod_base = OTHER; note = 2'-deoxy-2'-fluoro-uridine-3'-phosphorothioate
  modified_base 3: mod_base = OTHER; note = 2'-O-methyl-uridine-3'-phosphate
  modified_base 4: mod_base = OTHER; note = 2'-O-methyl-guanosine-3'-phosphate
  modified_base 5: mod_base = OTHER; note = 2'-O-methyl-uridine-3'-phosphate
  modified_base 6: mod_base = OTHER; note = 2'-deoxy-2'-fluoro-uridine-3'-phosphate
  modified_base 7: mod_base = OTHER; note = 2'-O-methyl-guanosine-3'-phosphate
  modified_base 8: mod_base = OTHER; note = 2'-deoxy-2'-fluoro-guanosine-3'-phosphate
  modified_base 9: mod_base = OTHER; note = 2'-deoxy-2'-fluoro-cytidine-3'-phosphate
  modified_base 10: mod_base = OTHER; note = 2'-O-methyl-adenosine-3'-phosphate
  modified_base 11: mod_base = OTHER; note = 2'-O-methyl-guanosine-3'-phosphate
  modified_base 12: mod_base = OTHER; note = 2'-O-methyl-uridine-3'-phosphate
  modified_base 13: mod_base = OTHER; note = 2'-O-methyl-guanosine-3'-phosphate
  modified_base 14: mod_base = OTHER; note = 2'-deoxy-2'-fluoro-cytidine-3'-phosphate
  modified_base 15: mod_base = OTHER; note = 2'-O-methyl-adenosine-3'-phosphate
  modified_base 16: mod_base = OTHER; note = 2'-deoxy-2'-fluoro-guanosine-3'-phosphate
  modified_base 17: mod_base = OTHER; note = 2'-O-methyl-uridine-3'-phosphate
  modified_base 18: mod_base = OTHER; note = 2'-O-methyl-uridine-3'-phosphate
  modified_base 19: mod_base = OTHER; note = 2'-O-methyl-uridine-3'-phosphorothioate
  modified_base 20: mod_base = OTHER; note = 2'-O-methyl-uridine-3'-phosphorothioate
  modified_base 21: mod_base = OTHER; note = 2'-O-methyl-uridine-3'-phosphate
cttgttggcagtgcagttttt

SEQ ID NO: 1916 - RNA, 21 nt, synthetic construct
  source 1..21: mol_type = other RNA
  modified_base 1: mod_base = OTHER; note = 2'-O-methyl-uridine-3'-phosphorothioate
  modified_base 2: mod_base = OTHER; note = 2'-deoxy-2'-fluoro-uridine-3'-phosphorothioate
  modified_base 3: mod_base = OTHER; note = 2'-O-methyl-uridine-3'-phosphate
  modified_base 4: mod_base = OTHER; note = 2'-O-methyl-cytidine-3'-phosphate
  modified_base 5: mod_base = OTHER; note = 2'-O-methyl-cytidine-3'-phosphate
  modified_base 6: mod_base = OTHER; note = 2'-deoxy-2'-fluoro-adenosine-3'-phosphate
  modified_base 7: mod_base = OTHER; note = 2'-O-methyl-uridine-3'-phosphate
  modified_base 8: mod_base = OTHER; note = 2'-deoxy-2'-fluoro-adenosine-3'-phosphate
  modified_base 9: mod_base = OTHER; note = 2'-deoxy-2'-fluoro-cytidine-3'-phosphate
  modified_base 10: mod_base = OTHER; note = 2'-O-methyl-uridine-3'-phosphate
  modified_base 11: mod_base = OTHER; note = 2'-O-methyl-uridine-3'-phosphate
  modified_base 12: mod_base = OTHER; note = 2'-O-methyl-guanosine-3'-phosphate
  modified_base 13: mod_base = OTHER; note = 2'-O-methyl-adenosine-3'-phosphate
  modified_base 14: mod_base = OTHER; note = 2'-deoxy-2'-fluoro-uridine-3'-phosphate
  modified_base 15: mod_base = OTHER; note = 2'-O-methyl-uridine-3'-phosphate
  modified_base 16: mod_base = OTHER; note = 2'-deoxy-2'-fluoro-cytidine-3'-phosphate
  modified_base 17: mod_base = OTHER; note = 2'-O-methyl-uridine-3'-phosphate
  modified_base 18: mod_base = OTHER; note = 2'-O-methyl-cytidine-3'-phosphate
  modified_base 19: mod_base = OTHER; note = 2'-O-methyl-adenosine-3'-phosphorothioate
  modified_base 20: mod_base = OTHER; note = 2'-O-methyl-uridine-3'-phosphorothioate
  modified_base 21: mod_base = OTHER; note = 2'-O-methyl-uridine-3'-phosphate
tttccatacttgattctcatt

SEQ ID NO: 1917 - RNA, 21 nt, synthetic construct
  source 1..21: mol_type = other RNA
  modified_base 1: mod_base = OTHER; note = 2'-O-methyl-cytidine-3'-phosphorothioate
  modified_base 2: mod_base = OTHER; note = 2'-deoxy-2'-fluoro-adenosine-3'-phosphorothioate
  modified_base 3: mod_base = OTHER; note = 2'-O-methyl-cytidine-3'-phosphate
  modified_base 4: mod_base = OTHER; note = 2'-O-methyl-adenosine-3'-phosphate
  modified_base 5: mod_base = OTHER; note = 2'-O-methyl-uridine-3'-phosphate
  modified_base 6: mod_base = OTHER; note = 2'-deoxy-2'-fluoro-adenosine-3'-phosphate
  modified_base 7: mod_base = OTHER; note = 2'-O-methyl-uridine-3'-phosphate
  modified_base 8: mod_base = OTHER; note = 2'-deoxy-2'-fluoro-uridine-3'-phosphate
  modified_base 9: mod_base = OTHER; note = 2'-deoxy-2'-fluoro-adenosine-3'-phosphate
  modified_base 10: mod_base = OTHER; note = 2'-O-methyl-adenosine-3'-phosphate
  modified_base 11: mod_base = OTHER; note = 2'-O-methyl-cytidine-3'-phosphate
  modified_base 12: mod_base = OTHER; note = 2'-O-methyl-cytidine-3'-phosphate
  modified_base 13: mod_base = OTHER; note = 2'-O-methyl-adenosine-3'-phosphate
  modified_base 14: mod_base = OTHER; note = 2'-deoxy-2'-fluoro-cytidine-3'-phosphate
  modified_base 15: mod_base = OTHER; note = 2'-O-methyl-cytidine-3'-phosphate
  modified_base 16: mod_base = OTHER; note = 2'-deoxy-2'-fluoro-adenosine-3'-phosphate
  modified_base 17: mod_base = OTHER; note = 2'-O-methyl-guanosine-3'-phosphate
  modified_base 18: mod_base = OTHER; note = 2'-O-methyl-uridine-3'-phosphate
  modified_base 19: mod_base = OTHER; note = 2'-O-methyl-uridine-3'-phosphorothioate
  modified_base 20: mod_base = OTHER; note = 2'-O-methyl-uridine-3'-phosphorothioate
  modified_base 21: mod_base = OTHER; note = 2'-O-methyl-uridine-3'-phosphate
cacatattaaccaccagtttt

SEQ ID NO: 1918 - RNA, 21 nt, synthetic construct
  source 1..21: mol_type = other RNA
  modified_base 1: mod_base = OTHER; note = 2'-O-methyl-uridine-3'-phosphorothioate
  modified_base 2: mod_base = OTHER; note = 2'-deoxy-2'-fluoro-cytidine-3'-phosphorothioate
  modified_base 3: mod_base = OTHER; note = 2'-O-methyl-adenosine-3'-phosphate
  modified_base 4: mod_base = OTHER; note = 2'-O-methyl-cytidine-3'-phosphate
  modified_base 5: mod_base = OTHER; note = 2'-O-methyl-adenosine-3'-phosphate
  modified_base 6: mod_base = OTHER; note = 2'-deoxy-2'-fluoro-uridine-3'-phosphate
  modified_base 7: mod_base = OTHER; note = 2'-O-methyl-adenosine-3'-phosphate
  modified_base 8: mod_base = OTHER; note = 2'-deoxy-2'-fluoro-uridine-3'-phosphate
  modified_base 9: mod_base = OTHER; note = 2'-deoxy-2'-fluoro-uridine-3'-phosphate
  modified_base 10: mod_base = OTHER; note = 2'-O-methyl-adenosine-3'-phosphate
  modified_base 11: mod_base = OTHER; note = 2'-O-methyl-adenosine-3'-phosphate
  modified_base 12: mod_base = OTHER; note = 2'-O-methyl-cytidine-3'-phosphate
  modified_base 13: mod_base = OTHER; note = 2'-O-methyl-cytidine-3'-phosphate
  modified_base 14: mod_base = OTHER; note = 2'-deoxy-2'-fluoro-adenosine-3'-phosphate
  modified_base 15: mod_base = OTHER; note = 2'-O-methyl-cytidine-3'-phosphate
  modified_base 16: mod_base = OTHER; note = 2'-deoxy-2'-fluoro-cytidine-3'-phosphate
  modified_base 17: mod_base = OTHER; note = 2'-O-methyl-adenosine-3'-phosphate
  modified_base 18: mod_base = OTHER; note = 2'-O-methyl-guanosine-3'-phosphate
  modified_base 19: mod_base = OTHER; note = 2'-O-methyl-uridine-3'-phosphorothioate
  modified_base 20: mod_base = OTHER; note = 2'-O-methyl-uridine-3'-phosphorothioate
  modified_base 21: mod_base = OTHER; note = 2'-O-methyl-uridine-3'-phosphate
tcacatattaaccaccagttt

SEQ ID NO: 1919 - RNA, 21 nt, synthetic construct
  source 1..21: mol_type = other RNA
  modified_base 1: mod_base = OTHER; note = 2'-O-methyl-uridine-3'-phosphorothioate
  modified_base 2: mod_base = OTHER; note = 2'-deoxy-2'-fluoro-adenosine-3'-phosphorothioate
  modified_base 3: mod_base = OTHER; note = 2'-O-methyl-guanosine-3'-phosphate
  modified_base 4: mod_base = OTHER; note = 2'-O-methyl-guanosine-3'-phosphate
  modified_base 5: mod_base = OTHER; note = 2'-O-methyl-adenosine-3'-phosphate
  modified_base 6: mod_base = OTHER; note = 2'-deoxy-2'-fluoro-adenosine-3'-phosphate
  modified_base 7: mod_base = OTHER; note = 2'-O-methyl-uridine-3'-phosphate
  modified_base 8: mod_base = OTHER; note = 2'-deoxy-2'-fluoro-adenosine-3'-phosphate
  modified_base 9: mod_base = OTHER; note = 2'-deoxy-2'-fluoro-uridine-3'-phosphate
  modified_base 10: mod_base = OTHER; note = 2'-O-methyl-adenosine-3'-phosphate
  modified_base 11: mod_base = OTHER; note = 2'-O-methyl-guanosine-3'-phosphate
  modified_base 12: mod_base = OTHER; note = 2'-O-methyl-uridine-3'-phosphate
  modified_base 13: mod_base = OTHER; note = 2'-O-methyl-guanosine-3'-phosphate
  modified_base 14: mod_base = OTHER; note = 2'-deoxy-2'-fluoro-uridine-3'-phosphate
  modified_base 15: mod_base = OTHER; note = 2'-O-methyl-adenosine-3'-phosphate
  modified_base 16: mod_base = OTHER; note = 2'-deoxy-2'-fluoro-uridine-3'-phosphate
  modified_base 17: mod_base = OTHER; note = 2'-O-methyl-adenosine-3'-phosphate
  modified_base 18: mod_base = OTHER; note = 2'-O-methyl-adenosine-3'-phosphate
  modified_base 19: mod_base = OTHER; note = 2'-O-methyl-uridine-3'-phosphorothioate
  modified_base 20: mod_base = OTHER; note = 2'-O-methyl-uridine-3'-phosphorothioate
  modified_base 21: mod_base = OTHER; note = 2'-O-methyl-uridine-3'-phosphate
taggaatatagtgtataattt

SEQ ID NO: 1920 - RNA, 21 nt, synthetic construct
  source 1..21: mol_type = other RNA
  modified_base 1: mod_base = OTHER; note = 2'-O-methyl-uridine-3'-phosphorothioate
  modified_base 2: mod_base = OTHER; note = 2'-deoxy-2'-fluoro-uridine-3'-phosphorothioate
  modified_base 3: mod_base = OTHER; note = 2'-O-methyl-cytidine-3'-phosphate
  modified_base 4: mod_base = OTHER; note = 2'-O-methyl-uridine-3'-phosphate
  modified_base 5: mod_base = OTHER; note = 2'-O-methyl-guanosine-3'-phosphate
  modified_base 6: mod_base = OTHER; note = 2'-deoxy-2'-fluoro-uridine-3'-phosphate
  modified_base 7: mod_base = OTHER; note = 2'-O-methyl-adenosine-3'-phosphate
  modified_base 8: mod_base = OTHER; note = 2'-deoxy-2'-fluoro-uridine-3'-phosphate
  modified_base 9: mod_base = OTHER; note = 2'-deoxy-2'-fluoro-uridine-3'-phosphate
  modified_base 10: mod_base = OTHER; note = 2'-O-methyl-guanosine-3'-phosphate
  modified_base 11: mod_base = OTHER; note = 2'-O-methyl-guanosine-3'-phosphate
  modified_base 12: mod_base = OTHER; note = 2'-O-methyl-uridine-3'-phosphate
  modified_base 13: mod_base = OTHER; note = 2'-O-methyl-adenosine-3'-phosphate
  modified_base 14: mod_base = OTHER; note = 2'-deoxy-2'-fluoro-adenosine-3'-phosphate
  modified_base 15: mod_base = OTHER; note = 2'-O-methyl-uridine-3'-phosphate
  modified_base 16: mod_base = OTHER; note = 2'-deoxy-2'-fluoro-uridine-3'-phosphate
  modified_base 17: mod_base = OTHER; note = 2'-O-methyl-uridine-3'-phosphate
  modified_base 18: mod_base = OTHER; note = 2'-O-methyl-adenosine-3'-phosphate
  modified_base 19: mod_base = OTHER; note = 2'-O-methyl-cytidine-3'-phosphorothioate
  modified_base 20: mod_base = OTHER; note = 2'-O-methyl-uridine-3'-phosphorothioate
  modified_base 21: mod_base = OTHER; note = 2'-O-methyl-uridine-3'-phosphate
ttctgtattggtaatttactt

SEQ ID NO: 1921 - RNA, 21 nt, synthetic construct
  source 1..21: mol_type = other RNA
  modified_base 1: mod_base = OTHER; note = 2'-O-methyl-guanosine-3'-phosphorothioate
  modified_base 2: mod_base = OTHER; note = 2'-deoxy-2'-fluoro-guanosine-3'-phosphorothioate
  modified_base 3: mod_base = OTHER; note = 2'-O-methyl-adenosine-3'-phosphate
  modified_base 4: mod_base = OTHER; note = 2'-O-methyl-adenosine-3'-phosphate
  modified_base 5: mod_base = OTHER; note = 2'-O-methyl-uridine-3'-phosphate
  modified_base 6: mod_base = OTHER; note = 2'-deoxy-2'-fluoro-adenosine-3'-phosphate
  modified_base 7: mod_base = OTHER; note = 2'-O-methyl-uridine-3'-phosphate
  modified_base 8: mod_base = OTHER; note = 2'-deoxy-2'-fluoro-guanosine-3'-phosphate
  modified_base 9: mod_base = OTHER; note = 2'-deoxy-2'-fluoro-adenosine-3'-phosphate
  modified_base 10: mod_base = OTHER; note = 2'-O-methyl-cytidine-3'-phosphate
  modified_base 11: mod_base = OTHER; note = 2'-O-methyl-uridine-3'-phosphate
  modified_base 12: mod_base = OTHER; note = 2'-O-methyl-adenosine-3'-phosphate
  modified_base 13: mod_base = OTHER; note = 2'-O-methyl-adenosine-3'-phosphate
  modified_base 14: mod_base = OTHER; note = 2'-deoxy-2'-fluoro-uridine-3'-phosphate
  modified_base 15: mod_base = OTHER; note = 2'-O-methyl-cytidine-3'-phosphate
  modified_base 16: mod_base = OTHER; note = 2'-deoxy-2'-fluoro-adenosine-3'-phosphate
  modified_base 17: mod_base = OTHER; note = 2'-O-methyl-guanosine-3'-phosphate
  modified_base 18: mod_base = OTHER; note = 2'-O-methyl-uridine-3'-phosphate
  modified_base 19: mod_base = OTHER; note = 2'-O-methyl-uridine-3'-phosphorothioate
  modified_base 20: mod_base = OTHER; note = 2'-O-methyl-uridine-3'-phosphorothioate
  modified_base 21: mod_base = OTHER; note = 2'-O-methyl-uridine-3'-phosphate
ggaatatgactaatcagtttt

SEQ ID NO: 1922 - RNA, 21 nt, synthetic construct
  source 1..21: mol_type = other RNA
  modified_base 1: mod_base = OTHER; note = 2'-O-methyl-uridine-3'-phosphorothioate
  modified_base 2: mod_base = OTHER; note = 2'-deoxy-2'-fluoro-adenosine-3'-phosphorothioate
  modified_base 3: mod_base = OTHER; note = 2'-O-methyl-adenosine-3'-phosphate
  modified_base 4: mod_base = OTHER; note = 2'-O-methyl-guanosine-3'-phosphate
  modified_base 5: mod_base = OTHER; note = 2'-O-methyl-adenosine-3'-phosphate
  modified_base 6: mod_base = OTHER; note = 2'-deoxy-2'-fluoro-adenosine-3'-phosphate
  modified_base 7: mod_base = OTHER; note = 2'-O-methyl-cytidine-3'-phosphate
  modified_base 8: mod_base = OTHER; note = 2'-deoxy-2'-fluoro-uridine-3'-phosphate
  modified_base 9: mod_base = OTHER; note = 2'-deoxy-2'-fluoro-uridine-3'-phosphate
  modified_base 10: mod_base = OTHER; note = 2'-O-methyl-adenosine-3'-phosphate
  modified_base 11: mod_base = OTHER; note = 2'-O-methyl-uridine-3'-phosphate
  modified_base 12: mod_base = OTHER; note = 2'-O-methyl-uridine-3'-phosphate
  modified_base 13: mod_base = OTHER; note = 2'-O-methyl-cytidine-3'-phosphate
  modified_base 14: mod_base = OTHER; note = 2'-deoxy-2'-fluoro-uridine-3'-phosphate
  modified_base 15: mod_base = OTHER; note = 2'-O-methyl-adenosine-3'-phosphate
  modified_base 16: mod_base = OTHER; note = 2'-deoxy-2'-fluoro-uridine-3'-phosphate
  modified_base 17: mod_base = OTHER; note = 2'-O-methyl-adenosine-3'-phosphate
  modified_base 18: mod_base = OTHER; note = 2'-O-methyl-guanosine-3'-phosphate
  modified_base 19: mod_base = OTHER; note = 2'-O-methyl-uridine-3'-phosphorothioate
  modified_base 20: mod_base = OTHER; note = 2'-O-methyl-uridine-3'-phosphorothioate
  modified_base 21: mod_base = OTHER; note = 2'-O-methyl-uridine-3'-phosphate
taagaacttattctatagttt

SEQ ID NO: 1923 - RNA, 21 nt, synthetic construct
  source 1..21: mol_type = other RNA
  modified_base 1: mod_base = OTHER; note = 2'-O-methyl-uridine-3'-phosphorothioate
  modified_base 2: mod_base = OTHER; note = 2'-deoxy-2'-fluoro-uridine-3'-phosphorothioate
  modified_base 3: mod_base = OTHER; note = 2'-O-methyl-guanosine-3'-phosphate
  modified_base 4: mod_base = OTHER; note = 2'-O-methyl-adenosine-3'-phosphate
  modified_base 5: mod_base = OTHER; note = 2'-O-methyl-guanosine-3'-phosphate
  modified_base 6: mod_base = OTHER; note = 2'-deoxy-2'-fluoro-guanosine-3'-phosphate
  modified_base 7: mod_base = OTHER; note = 2'-O-methyl-cytidine-3'-phosphate
  modified_base 8: mod_base = OTHER; note = 2'-deoxy-2'-fluoro-uridine-3'-phosphate
  modified_base 9: mod_base = OTHER; note = 2'-deoxy-2'-fluoro-cytidine-3'-phosphate
  modified_base 10: mod_base = OTHER; note = 2'-O-methyl-uridine-3'-phosphate
  modified_base 11: mod_base = OTHER; note = 2'-O-methyl-uridine-3'-phosphate
  modified_base 12: mod_base = OTHER; note = 2'-O-methyl-cytidine-3'-phosphate
  modified_base 13: mod_base = OTHER; note = 2'-O-methyl-uridine-3'-phosphate
  modified_base 14: mod_base = OTHER; note = 2'-deoxy-2'-fluoro-uridine-3'-phosphate
  modified_base 15: mod_base = OTHER; note = 2'-O-methyl-adenosine-3'-phosphate
  modified_base 16: mod_base = OTHER; note = 2'-deoxy-2'-fluoro-uridine-3'-phosphate
  modified_base 17: mod_base = OTHER; note = 2'-O-methyl-adenosine-3'-phosphate
  modified_base 18: mod_base = OTHER; note = 2'-O-methyl-guanosine-3'-phosphate
  modified_base 19: mod_base = OTHER; note = 2'-O-methyl-cytidine-3'-phosphorothioate
  modified_base 20: mod_base = OTHER; note = 2'-O-methyl-uridine-3'-phosphorothioate
  modified_base 21: mod_base = OTHER; note = 2'-O-methyl-uridine-3'-phosphate
ttgaggctcttcttatagctt

SEQ ID NO: 1924 - RNA, 21 nt, synthetic construct
  source 1..21: mol_type = other RNA
  modified_base 1: mod_base = OTHER; note = 2'-O-methyl-adenosine-3'-phosphorothioate
  modified_base 2: mod_base = OTHER; note = 2'-deoxy-2'-fluoro-guanosine-3'-phosphorothioate
  modified_base 3: mod_base = OTHER; note = 2'-O-methyl-uridine-3'-phosphate
  modified_base 4: mod_base = OTHER; note = 2'-O-methyl-cytidine-3'-phosphate
  modified_base 5: mod_base = OTHER; note = 2'-O-methyl-uridine-3'-phosphate
  modified_base 6: mod_base = OTHER; note = 2'-deoxy-2'-fluoro-uridine-3'-phosphate
  modified_base 7: mod_base = OTHER; note = 2'-O-methyl-adenosine-3'-phosphate
  modified_base 8: mod_base = OTHER; note = 2'-deoxy-2'-fluoro-adenosine-3'-phosphate
  modified_base 9: mod_base = OTHER; note = 2'-deoxy-2'-fluoro-uridine-3'-phosphate
  modified_base 10: mod_base = OTHER; note = 2'-O-methyl-cytidine-3'-phosphate
  modified_base 11: mod_base = OTHER; note = 2'-O-methyl-uridine-3'-phosphate
  modified_base 12: mod_base = OTHER; note = 2'-O-methyl-uridine-3'-phosphate
  modified_base 13: mod_base = OTHER; note = 2'-O-methyl-guanosine-3'-phosphate
  modified_base 14: mod_base = OTHER; note = 2'-deoxy-2'-fluoro-adenosine-3'-phosphate
  modified_base 15: mod_base = OTHER; note = 2'-O-methyl-cytidine-3'-phosphate
  modified_base 16: mod_base = OTHER; note = 2'-deoxy-2'-fluoro-cytidine-3'-phosphate
  modified_base 17: mod_base = OTHER; note = 2'-O-methyl-uridine-3'-phosphate
  modified_base 18: mod_base = OTHER; note = 2'-O-methyl-uridine-3'-phosphate
  modified_base 19: mod_base = OTHER; note = 2'-O-methyl-uridine-3'-phosphorothioate
  modified_base 20: mod_base = OTHER; note = 2'-O-methyl-uridine-3'-phosphorothioate
  modified_base 21: mod_base = OTHER; note = 2'-O-methyl-uridine-3'-phosphate
agtcttaatcttgaccttttt

SEQ ID NO: 1925 - RNA, 21 nt, synthetic construct
  source 1..21: mol_type = other RNA
  modified_base 1: mod_base = OTHER; note = 2'-O-methyl-uridine-3'-phosphorothioate
  modified_base 2: mod_base = OTHER; note = 2'-deoxy-2'-fluoro-adenosine-3'-phosphorothioate
  modified_base 3: mod_base = OTHER; note = 2'-O-methyl-guanosine-3'-phosphate
  modified_base 4: mod_base = OTHER; note = 2'-O-methyl-uridine-3'-phosphate
  modified_base 5: mod_base = OTHER; note = 2'-O-methyl-cytidine-3'-phosphate
  modified_base 6: mod_base = OTHER; note = 2'-deoxy-2'-fluoro-uridine-3'-phosphate
  modified_base 7: mod_base = OTHER; note = 2'-O-methyl-uridine-3'-phosphate
  modified_base 8: mod_base = OTHER; note = 2'-deoxy-2'-fluoro-adenosine-3'-phosphate
  modified_base 9: mod_base = OTHER; note = 2'-deoxy-2'-fluoro-adenosine-3'-phosphate
  modified_base 10: mod_base = OTHER; note = 2'-O-methyl-uridine-3'-phosphate
  modified_base 11: mod_base = OTHER; note = 2'-O-methyl-cytidine-3'-phosphate
  modified_base 12: mod_base = OTHER; note = 2'-O-methyl-uridine-3'-phosphate
  modified_base 13: mod_base = OTHER; note = 2'-O-methyl-uridine-3'-phosphate
  modified_base 14: mod_base = OTHER; note = 2'-deoxy-2'-fluoro-guanosine-3'-phosphate
  modified_base 15: mod_base = OTHER; note = 2'-O-methyl-adenosine-3'-phosphate
  modified_base 16: mod_base = OTHER; note = 2'-deoxy-2'-fluoro-cytidine-3'-phosphate
  modified_base 17: mod_base = OTHER; note = 2'-O-methyl-cytidine-3'-phosphate
  modified_base 18: mod_base = OTHER; note = 2'-O-methyl-uridine-3'-phosphate
  modified_base 19: mod_base = OTHER; note = 2'-O-methyl-uridine-3'-phosphorothioate
  modified_base 20: mod_base = OTHER; note = 2'-O-methyl-uridine-3'-phosphorothioate
  modified_base 21: mod_base = OTHER; note = 2'-O-methyl-uridine-3'-phosphate
tagtcttaatcttgacctttt

SEQ ID NO: 1926 - RNA, 21 nt, synthetic construct
  source 1..21: mol_type = other RNA
  modified_base 1: mod_base = OTHER; note = 2'-O-methyl-uridine-3'-phosphorothioate
  modified_base 2: mod_base = OTHER; note = 2'-deoxy-2'-fluoro-adenosine-3'-phosphorothioate
  modified_base 3: mod_base = OTHER; note = 2'-O-methyl-adenosine-3'-phosphate
  modified_base 4: mod_base = OTHER; note = 2'-O-methyl-guanosine-3'-phosphate
  modified_base 5: mod_base = OTHER; note = 2'-O-methyl-uridine-3'-phosphate
  modified_base 6: mod_base = OTHER; note = 2'-deoxy-2'-fluoro-uridine-3'-phosphate
  modified_base 7: mod_base = OTHER; note = 2'-O-methyl-uridine-3'-phosphate
  modified_base 8: mod_base = OTHER; note = 2'-deoxy-2'-fluoro-uridine-3'-phosphate
  modified_base 9: mod_base = OTHER; note = 2'-deoxy-2'-fluoro-adenosine-3'-phosphate
  modified_base 10: mod_base = OTHER; note = 2'-O-methyl-guanosine-3'-phosphate
  modified_base 11: mod_base = OTHER; note = 2'-O-methyl-uridine-3'-phosphate
  modified_base 12: mod_base = OTHER; note = 2'-O-methyl-cytidine-3'-phosphate
  modified_base 13: mod_base = OTHER; note = 2'-O-methyl-uridine-3'-phosphate
  modified_base 14: mod_base = OTHER; note = 2'-deoxy-2'-fluoro-uridine-3'-phosphate
  modified_base 15: mod_base = OTHER; note = 2'-O-methyl-adenosine-3'-phosphate
  modified_base 16: mod_base = OTHER; note = 2'-deoxy-2'-fluoro-adenosine-3'-phosphate
  modified_base 17: mod_base = OTHER; note = 2'-O-methyl-uridine-3'-phosphate
  modified_base 18: mod_base = OTHER; note = 2'-O-methyl-cytidine-3'-phosphate
  modified_base 19: mod_base = OTHER; note = 2'-O-methyl-uridine-3'-phosphorothioate
  modified_base 20: mod_base = OTHER; note = 2'-O-methyl-uridine-3'-phosphorothioate
  modified_base 21: mod_base = OTHER; note = 2'-O-methyl-uridine-3'-phosphate
taagttttagtcttaatcttt

SEQ ID NO: 1927 - RNA, 21 nt, synthetic construct
  source 1..21: mol_type = other RNA
  modified_base 1: mod_base = OTHER; note = 2'-O-methyl-adenosine-3'-phosphorothioate
  modified_base 2: mod_base = OTHER; note = 2'-deoxy-2'-fluoro-uridine-3'-phosphorothioate
  modified_base 3: mod_base = OTHER; note = 2'-O-methyl-adenosine-3'-phosphate
  modified_base 4: mod_base = OTHER; note = 2'-O-methyl-adenosine-3'-phosphate
  modified_base 5: mod_base = OTHER; note = 2'-O-methyl-uridine-3'-phosphate
  modified_base 6: mod_base = OTHER; note = 2'-deoxy-2'-fluoro-guanosine-3'-phosphate
  modified_base 7: mod_base = OTHER; note = 2'-O-methyl-adenosine-3'-phosphate
  modified_base 8: mod_base = OTHER; note = 2'-deoxy-2'-fluoro-cytidine-3'-phosphate
  modified_base 9: mod_base = OTHER; note = 2'-deoxy-2'-fluoro-adenosine-3'-phosphate
  modified_base 10: mod_base = OTHER; note = 2'-O-methyl-cytidine-3'-phosphate
  modified_base 11: mod_base = OTHER; note = 2'-O-methyl-uridine-3'-phosphate
  modified_base 12: mod_base = OTHER; note = 2'-O-methyl-uridine-3'-phosphate
  modified_base 13: mod_base = OTHER; note = 2'-O-methyl-cytidine-3'-phosphate
  modified_base 14: mod_base = OTHER; note = 2'-deoxy-2'-fluoro-adenosine-3'-phosphate
  modified_base 15: mod_base = OTHER; note = 2'-O-methyl-uridine-3'-phosphate
  modified_base 16: mod_base = OTHER; note = 2'-deoxy-2'-fluoro-uridine-3'-phosphate
  modified_base 17: mod_base = OTHER; note = 2'-O-methyl-uridine-3'-phosphate
  modified_base 18: mod_base = OTHER; note = 2'-O-methyl-guanosine-3'-phosphate
  modified_base 19: mod_base = OTHER; note = 2'-O-methyl-uridine-3'-phosphorothioate
  modified_base 20: mod_base = OTHER; note = 2'-O-methyl-uridine-3'-phosphorothioate
  modified_base 21: mod_base = OTHER; note = 2'-O-methyl-uridine-3'-phosphate
ataatgacacttcatttgttt

SEQ ID NO: 1928 - RNA, 21 nt, synthetic construct
  source 1..21: mol_type = other RNA
  modified_base 1: mod_base = OTHER; note = 2'-O-methyl-uridine-3'-phosphorothioate
  modified_base 2: mod_base = OTHER; note = 2'-deoxy-2'-fluoro-guanosine-3'-phosphorothioate
  modified_base 3: mod_base = OTHER; note = 2'-O-methyl-guanosine-3'-phosphate
  modified_base 4: mod_base = OTHER; note = 2'-O-methyl-guanosine-3'-phosphate
  modified_base 5: mod_base = OTHER; note = 2'-O-methyl-adenosine-3'-phosphate
  modified_base 6: mod_base = OTHER; note = 2'-deoxy-2'-fluoro-uridine-3'-phosphate
  modified_base 7: mod_base = OTHER; note = 2'-O-methyl-adenosine-3'-phosphate
  modified_base 8: mod_base = OTHER; note = 2'-deoxy-2'-fluoro-guanosine-3'-phosphate
  modified_base 9: mod_base = OTHER; note = 2'-deoxy-2'-fluoro-adenosine-3'-phosphate
  modified_base 10: mod_base = OTHER; note = 2'-O-methyl-adenosine-3'-phosphate
  modified_base 11: mod_base = OTHER; note = 2'-O-methyl-adenosine-3'-phosphate
  modified_base 12: mod_base = OTHER; note = 2'-O-methyl-uridine-3'-phosphate
  modified_base 13: mod_base = OTHER; note = 2'-O-methyl-uridine-3'-phosphate
  modified_base 14: mod_base = OTHER; note = 2'-deoxy-2'-fluoro-uridine-3'-phosphate
  modified_base 15: mod_base = OTHER; note = 2'-O-methyl-guanosine-3'-phosphate
  modified_base 16: mod_base = OTHER; note = 2'-deoxy-2'-fluoro-uridine-3'-phosphate
  modified_base 17: mod_base = OTHER; note = 2'-O-methyl-guanosine-3'-phosphate
  modified_base 18: mod_base = OTHER; note = 2'-O-methyl-adenosine-3'-phosphate
  modified_base 19: mod_base = OTHER; note = 2'-O-methyl-guanosine-3'-phosphorothioate
  modified_base 20: mod_base = OTHER; note = 2'-O-methyl-uridine-3'-phosphorothioate
  modified_base 21: mod_base = OTHER; note = 2'-O-methyl-uridine-3'-phosphate
tgggatagaaatttgtgagtt

SEQ ID NO: 1929 - RNA, 21 nt, synthetic construct
  source 1..21: mol_type = other RNA
  modified_base 1: mod_base = OTHER; note = 2'-O-methyl-uridine-3'-phosphorothioate
  modified_base 2: mod_base = OTHER; note = 2'-deoxy-2'-fluoro-guanosine-3'-phosphorothioate
  modified_base 3: mod_base = OTHER; note = 2'-O-methyl-uridine-3'-phosphate
  modified_base 4: mod_base = OTHER; note = 2'-O-methyl-uridine-3'-phosphate
  modified_base 5: mod_base = OTHER; note = 2'-O-methyl-guanosine-3'-phosphate
  modified_base 6: mod_base = OTHER; note = 2'-deoxy-2'-fluoro-guanosine-3'-phosphate
  modified_base 7: mod_base = OTHER; note = 2'-O-methyl-cytidine-3'-phosphate
  modified_base 8: mod_base = OTHER; note = 2'-deoxy-2'-fluoro-adenosine-3'-phosphate
  modified_base 9: mod_base = OTHER; note = 2'-deoxy-2'-fluoro-guanosine-3'-phosphate
  modified_base 10: mod_base = OTHER; note = 2'-O-methyl-uridine-3'-phosphate
  modified_base 11: mod_base = OTHER; note = 2'-O-methyl-guanosine-3'-phosphate
  modified_base 12: mod_base = OTHER; note = 2'-O-methyl-cytidine-3'-phosphate
  modified_base 13: mod_base = OTHER; note = 2'-O-methyl-adenosine-3'-phosphate
  modified_base 14: mod_base = OTHER; note = 2'-deoxy-2'-fluoro-guanosine-3'-phosphate
  modified_base 15: mod_base = OTHER; note = 2'-O-methyl-uridine-3'-phosphate
  modified_base 16: mod_base = OTHER; note = 2'-deoxy-2'-fluoro-uridine-3'-phosphate
  modified_base 17: mod_base = OTHER; note = 2'-O-methyl-uridine-3'-phosphate
  modified_base 18: mod_base = OTHER; note = 2'-O-methyl-uridine-3'-phosphate
  modified_base 19: mod_base = OTHER; note = 2'-O-methyl-adenosine-3'-phosphorothioate
  modified_base 20: mod_base = OTHER; note = 2'-O-methyl-uridine-3'-phosphorothioate
  modified_base 21: mod_base = OTHER; note = 2'-O-methyl-uridine-3'-phosphate
tgttggcagtgcagttttatt

SEQ ID NO: 1930 - RNA, 21 nt, synthetic construct
  source 1..21: mol_type = other RNA
  modified_base 1: mod_base = OTHER; note = 2'-O-methyl-adenosine-3'-phosphorothioate
  modified_base 2: mod_base = OTHER; note = 2'-deoxy-2'-fluoro-cytidine-3'-phosphorothioate
  modified_base 3: mod_base = OTHER; note = 2'-O-methyl-uridine-3'-phosphate
  modified_base 4: mod_base = OTHER; note = 2'-O-methyl-uridine-3'-phosphate
  modified_base 5: mod_base = OTHER; note = 2'-O-methyl-guanosine-3'-phosphate
  modified_base 6: mod_base = OTHER; note = 2'-deoxy-2'-fluoro-uridine-3'-phosphate
  modified_base 7: mod_base = OTHER; note = 2'-O-methyl-uridine-3'-phosphate
  modified_base 8: mod_base = OTHER; note = 2'-deoxy-2'-fluoro-guanosine-3'-phosphate
  modified_base 9: mod_base = OTHER; note = 2'-deoxy-2'-fluoro-guanosine-3'-phosphate
  modified_base 10: mod_base = OTHER; note = 2'-O-methyl-cytidine-3'-phosphate
  modified_base 11: mod_base = OTHER; note = 2'-O-methyl-adenosine-3'-phosphate
  modified_base 12: mod_base = OTHER; note = 2'-O-methyl-guanosine-3'-phosphate
  modified_base 13: mod_base = OTHER; note = 2'-O-methyl-uridine-3'-phosphate
  modified_base 14: mod_base = OTHER; note = 2'-deoxy-2'-fluoro-guanosine-3'-phosphate
  modified_base 15: mod_base = OTHER; note = 2'-O-methyl-cytidine-3'-phosphate
  modified_base 16: mod_base = OTHER; note = 2'-deoxy-2'-fluoro-adenosine-3'-phosphate
  modified_base 17: mod_base = OTHER; note = 2'-O-methyl-guanosine-3'-phosphate
  modified_base 18: mod_base = OTHER; note = 2'-O-methyl-uridine-3'-phosphate
  modified_base 19: mod_base = OTHER; note = 2'-O-methyl-uridine-3'-phosphorothioate
  modified_base 20: mod_base = OTHER; note = 2'-O-methyl-uridine-3'-phosphorothioate
  modified_base 21: mod_base = OTHER; note = 2'-O-methyl-uridine-3'-phosphate
acttgttggcagtgcagtttt

SEQ ID NO: 1931 - RNA, 21 nt, synthetic construct
  source 1..21: mol_type = other RNA
  modified_base 1: mod_base = OTHER; note = 2'-O-methyl-adenosine-3'-phosphorothioate
  modified_base 2: mod_base = OTHER; note = 2'-deoxy-2'-fluoro-uridine-3'-phosphorothioate
  modified_base 3: mod_base = OTHER; note = 2'-O-methyl-adenosine-3'-phosphate
  modified_base 4: mod_base = OTHER; note = 2'-O-methyl-adenosine-3'-phosphate
  modified_base 5: mod_base = OTHER; note = 2'-O-methyl-adenosine-3'-phosphate
  modified_base 6: mod_base = OTHER; note = 2'-deoxy-2'-fluoro-uridine-3'-phosphate
  modified_base 7: mod_base = OTHER; note = 2'-O-methyl-adenosine-3'-phosphate
  modified_base 8: mod_base = OTHER; note = 2'-deoxy-2'-fluoro-guanosine-3'-phosphate
  modified_base 9: mod_base = OTHER; note = 2'-deoxy-2'-fluoro-adenosine-3'-phosphate
  modified_base 10: mod_base = OTHER; note = 2'-O-methyl-uridine-3'-phosphate
  modified_base 11: mod_base = OTHER; note = 2'-O-methyl-uridine-3'-phosphate
  modified_base 12: mod_base = OTHER; note = 2'-O-methyl-cytidine-3'-phosphate
  modified_base 13: mod_base = OTHER; note = 2'-O-methyl-uridine-3'-phosphate
  modified_base 14: mod_base = OTHER; note = 2'-deoxy-2'-fluoro-guanosine-3'-phosphate
  modified_base 15: mod_base = OTHER; note = 2'-O-methyl-uridine-3'-phosphate
  modified_base 16: mod_base = OTHER; note = 2'-deoxy-2'-fluoro-adenosine-3'-phosphate
  modified_base 17: mod_base = OTHER; note = 2'-O-methyl-guanosine-3'-phosphate
  modified_base 18: mod_base = OTHER; note = 2'-O-methyl-cytidine-3'-phosphate
  modified_base 19: mod_base = OTHER; note = 2'-O-methyl-uridine-3'-phosphorothioate
  modified_base 20: mod_base = OTHER; note = 2'-O-methyl-uridine-3'-phosphorothioate
  modified_base 21: mod_base = OTHER; note = 2'-O-methyl-uridine-3'-phosphate
ataaatagattctgtagcttt

SEQ ID NO: 1932 - RNA, 21 nt, synthetic construct
  source 1..21: mol_type = other RNA
  modified_base 1: mod_base = OTHER; note = 2'-O-methyl-guanosine-3'-phosphorothioate
  modified_base 2: mod_base = OTHER; note = 2'-deoxy-2'-fluoro-adenosine-3'-phosphorothioate
  modified_base 3: mod_base = OTHER; note = 2'-O-methyl-uridine-3'-phosphate
  modified_base 4: mod_base = OTHER; note = 2'-O-methyl-adenosine-3'-phosphate
  modified_base 5: mod_base = OTHER; note = 2'-O-methyl-adenosine-3'-phosphate
  modified_base 6: mod_base = OTHER; note = 2'-deoxy-2'-fluoro-adenosine-3'-phosphate
  modified_base 7: mod_base = OTHER; note = 2'-O-methyl-uridine-3'-phosphate
  modified_base 8: mod_base = OTHER; note = 2'-deoxy-2'-fluoro-adenosine-3'-phosphate
  modified_base 9: mod_base = OTHER; note = 2'-deoxy-2'-fluoro-guanosine-3'-phosphate
  modified_base 10: mod_base = OTHER; note = 2'-O-methyl-adenosine-3'-phosphate
  modified_base 11: mod_base = OTHER; note = 2'-O-methyl-uridine-3'-phosphate
  modified_base 12: mod_base = OTHER; note = 2'-O-methyl-uridine-3'-phosphate
  modified_base 13: mod_base = OTHER; note = 2'-O-methyl-cytidine-3'-phosphate
  modified_base 14: mod_base = OTHER; note = 2'-deoxy-2'-fluoro-uridine-3'-phosphate
  modified_base 15: mod_base = OTHER; note = 2'-O-methyl-guanosine-3'-phosphate
  modified_base 16: mod_base = OTHER; note = 2'-deoxy-2'-fluoro-uridine-3'-phosphate
  modified_base 17: mod_base = OTHER; note = 2'-O-methyl-adenosine-3'-phosphate
  modified_base 18: mod_base = OTHER; note = 2'-O-methyl-guanosine-3'-phosphate
  modified_base 19: mod_base = OTHER; note = 2'-O-methyl-cytidine-3'-phosphorothioate
  modified_base 20: mod_base = OTHER; note = 2'-O-methyl-uridine-3'-phosphorothioate
  modified_base 21: mod_base = OTHER; note = 2'-O-methyl-uridine-3'-phosphate
gataaatagattctgtagctt

SEQ ID NO: 1933 - RNA, 21 nt, synthetic construct
  source 1..21: mol_type = other RNA
  modified_base 1: mod_base = OTHER; note = 2'-O-methyl-uridine-3'-phosphorothioate
  modified_base 2: mod_base = OTHER; note = 2'-deoxy-2'-fluoro-adenosine-3'-phosphorothioate
  modified_base 3: mod_base = OTHER; note = 2'-O-methyl-uridine-3'-phosphate
  modified_base 4: mod_base = OTHER; note = 2'-O-methyl-guanosine-3'-phosphate
  modified_base 5: mod_base = OTHER; note = 2'-O-methyl-guanosine-3'-phosphate
  modified_base 6: mod_base = OTHER; note = 2'-deoxy-2'-fluoro-uridine-3'-phosphate
  modified_base 7: mod_base = OTHER; note = 2'-O-methyl-adenosine-3'-phosphate
  modified_base 8: mod_base = OTHER; note = 2'-deoxy-2'-fluoro-adenosine-3'-phosphate
  modified_base 9: mod_base = OTHER; note = 2'-deoxy-2'-fluoro-cytidine-3'-phosphate
  modified_base 10: mod_base = OTHER; note = 2'-O-methyl-adenosine-3'-phosphate
  modified_base 11: mod_base = OTHER; note = 2'-O-methyl-adenosine-3'-phosphate
  modified_base 12: mod_base = OTHER; note = 2'-O-methyl-uridine-3'-phosphate
  modified_base 13: mod_base = OTHER; note = 2'-O-methyl-adenosine-3'-phosphate
  modified_base 14: mod_base = OTHER; note = 2'-deoxy-2'-fluoro-adenosine-3'-phosphate
  modified_base 15: mod_base = OTHER; note = 2'-O-methyl-guanosine-3'-phosphate
  modified_base 16: mod_base = OTHER; note = 2'-deoxy-2'-fluoro-uridine-3'-phosphate
  modified_base 17: mod_base = OTHER; note = 2'-O-methyl-uridine-3'-phosphate
  modified_base 18: mod_base = OTHER; note = 2'-O-methyl-uridine-3'-phosphate
  modified_base 19: mod_base = OTHER; note = 2'-O-methyl-uridine-3'-phosphorothioate
  modified_base 20: mod_base = OTHER; note = 2'-O-methyl-uridine-3'-phosphorothioate
  modified_base 21: mod_base = OTHER; note = 2'-O-methyl-uridine-3'-phosphate
tatggtaacaataagtttttt

SEQ ID NO: 1934 - RNA, 21 nt, synthetic construct
  source 1..21: mol_type = other RNA
  modified_base 1: mod_base = OTHER; note = 2'-O-methyl-adenosine-3'-phosphorothioate
  modified_base 2: mod_base = OTHER; note = 2'-deoxy-2'-fluoro-cytidine-3'-phosphorothioate
  modified_base 3: mod_base = OTHER; note = 2'-O-methyl-adenosine-3'-phosphate
  modified_base 4: mod_base = OTHER; note = 2'-O-methyl-uridine-3'-phosphate
  modified_base 5: mod_base = OTHER; note = 2'-O-methyl-adenosine-3'-phosphate
  modified_base 6: mod_base = OTHER; note = 2'-deoxy-2'-fluoro-uridine-3'-phosphate
  modified_base 7: mod_base = OTHER; note = 2'-O-methyl-uridine-3'-phosphate
  modified_base 8: mod_base = OTHER; note = 2'-deoxy-2'-fluoro-adenosine-3'-phosphate
  modified_base 9: mod_base = OTHER; note = 2'-deoxy-2'-fluoro-adenosine-3'-phosphate
  modified_base 10: mod_base = OTHER; note = 2'-O-methyl-cytidine-3'-phosphate
  modified_base 11: mod_base = OTHER; note = 2'-O-methyl-cytidine-3'-phosphate
  modified_base 12: mod_base = OTHER; note = 2'-O-methyl-adenosine-3'-phosphate
  modified_base 13: mod_base = OTHER; note = 2'-O-methyl-cytidine-3'-phosphate
  modified_base 14: mod_base = OTHER; note = 2'-deoxy-2'-fluoro-cytidine-3'-phosphate
  modified_base 15: mod_base = OTHER; note = 2'-O-methyl-adenosine-3'-phosphate
  modified_base 16: mod_base = OTHER; note = 2'-deoxy-2'-fluoro-guanosine-3'-phosphate
  modified_base 17: mod_base = OTHER; note = 2'-O-methyl-uridine-3'-phosphate
  modified_base 18: mod_base = OTHER; note = 2'-O-methyl-uridine-3'-phosphate
  modified_base 19: mod_base = OTHER; note = 2'-O-methyl-cytidine-3'-phosphorothioate
  modified_base 20: mod_base = OTHER; note = 2'-O-methyl-uridine-3'-phosphorothioate
  modified_base 21: mod_base = OTHER; note = 2'-O-methyl-uridine-3'-phosphate
acatattaaccaccagttctt

SEQ ID NO: 1935 - RNA, 21 nt, synthetic construct
  source 1..21: mol_type = other RNA
  modified_base 1: mod_base = OTHER; note = 2'-O-methyl-cytidine-3'-phosphorothioate
  modified_base 2: mod_base = OTHER; note = 2'-deoxy-2'-fluoro-adenosine-3'-phosphorothioate
  modified_base 3: mod_base = OTHER; note = 2'-O-methyl-cytidine-3'-phosphate
  modified_base 4: mod_base = OTHER; note = 2'-O-methyl-adenosine-3'-phosphate
  modified_base 5: mod_base = OTHER; note = 2'-O-methyl-uridine-3'-phosphate
  modified_base 6: mod_base = OTHER; note = 2'-deoxy-2'-fluoro-adenosine-3'-phosphate
  modified_base 7: mod_base = OTHER; note = 2'-O-methyl-uridine-3'-phosphate
  modified_base 8: mod_base = OTHER; note = 2'-deoxy-2'-fluoro-uridine-3'-phosphate
  modified_base 9: mod_base = OTHER; note = 2'-deoxy-2'-fluoro-adenosine-3'-phosphate
  modified_base 10: mod_base = OTHER; note = 2'-O-methyl-adenosine-3'-phosphate
  modified_base 11: mod_base = OTHER; note = 2'-O-methyl-cytidine-3'-phosphate
  modified_base 12: mod_base = OTHER; note = 2'-O-methyl-cytidine-3'-phosphate
  modified_base 13: mod_base = OTHER; note = 2'-O-methyl-adenosine-3'-phosphate
  modified_base 14: mod_base = OTHER; note = 2'-deoxy-2'-fluoro-cytidine-3'-phosphate
  modified_base 15: mod_base = OTHER; note = 2'-O-methyl-cytidine-3'-phosphate
  modified_base 16: mod_base = OTHER; note = 2'-deoxy-2'-fluoro-adenosine-3'-phosphate
  modified_base 17: mod_base = OTHER; note = 2'-O-methyl-guanosine-3'-phosphate
  modified_base 18: mod_base = OTHER; note = 2'-O-methyl-uridine-3'-phosphate
  modified_base 19: mod_base = OTHER; note = 2'-O-methyl-uridine-3'-phosphorothioate
  modified_base 20: mod_base = OTHER; note = 2'-O-methyl-uridine-3'-phosphorothioate
  modified_base 21: mod_base = OTHER; note = 2'-O-methyl-uridine-3'-phosphate
cacatattaaccaccagtttt

SEQ ID NO: 1936 - RNA, 21 nt, synthetic construct
  source 1..21: mol_type = other RNA
  modified_base 1: mod_base = OTHER; note = 2'-O-methyl-uridine-3'-phosphorothioate
  modified_base 2: mod_base = OTHER; note = 2'-deoxy-2'-fluoro-cytidine-3'-phosphorothioate
  modified_base 3: mod_base = OTHER; note = 2'-O-methyl-adenosine-3'-phosphate
  modified_base 4: mod_base = OTHER; note = 2'-O-methyl-cytidine-3'-phosphate
  modified_base 5: mod_base = OTHER; note = 2'-O-methyl-adenosine-3'-phosphate
  modified_base 6: mod_base = OTHER; note = 2'-deoxy-2'-fluoro-uridine-3'-phosphate
  modified_base 7: mod_base = OTHER; note = 2'-O-methyl-adenosine-3'-phosphate
  modified_base 8: mod_base = OTHER; note = 2'-deoxy-2'-fluoro-uridine-3'-phosphate
  modified_base 9: mod_base = OTHER; note = 2'-deoxy-2'-fluoro-uridine-3'-phosphate
  modified_base 10: mod_base = OTHER; note = 2'-O-methyl-adenosine-3'-phosphate
  modified_base 11: mod_base = OTHER; note = 2'-O-methyl-adenosine-3'-phosphate
  modified_base 12: mod_base = OTHER; note = 2'-O-methyl-cytidine-3'-phosphate
  modified_base 13: mod_base = OTHER; note = 2'-O-methyl-cytidine-3'-phosphate
  modified_base 14: mod_base = OTHER; note = 2'-deoxy-2'-fluoro-adenosine-3'-phosphate
  modified_base 15: mod_base = OTHER; note = 2'-O-methyl-cytidine-3'-phosphate
  modified_base 16: mod_base = OTHER; note = 2'-deoxy-2'-fluoro-cytidine-3'-phosphate
  modified_base 17: mod_base = OTHER; note = 2'-O-methyl-adenosine-3'-phosphate
  modified_base 18: mod_base = OTHER; note = 2'-O-methyl-guanosine-3'-phosphate
  modified_base 19: mod_base = OTHER; note = 2'-O-methyl-uridine-3'-phosphorothioate
  modified_base 20: mod_base = OTHER; note = 2'-O-methyl-uridine-3'-phosphorothioate
  modified_base 21: mod_base = OTHER; note = 2'-O-methyl-uridine-3'-phosphate
tcacatattaaccaccagttt

SEQ ID NO: 1937 - RNA, 21 nt, synthetic construct
  source 1..21: mol_type = other RNA
  modified_base 1: mod_base = OTHER; note = 2'-O-methyl-guanosine-3'-phosphorothioate
  modified_base 2: mod_base = OTHER; note = 2'-deoxy-2'-fluoro-uridine-3'-phosphorothioate
  modified_base 3: mod_base = OTHER; note = 2'-O-methyl-cytidine-3'-phosphate
  modified_base 4: mod_base = OTHER; note = 2'-O-methyl-adenosine-3'-phosphate
  modified_base 5: mod_base = OTHER; note = 2'-O-methyl-cytidine-3'-phosphate
  modified_base 6: mod_base = OTHER; note = 2'-deoxy-2'-fluoro-adenosine-3'-phosphate
  modified_base 7: mod_base = OTHER; note = 2'-O-methyl-uridine-3'-phosphate
  modified_base 8: mod_base = OTHER; note = 2'-deoxy-2'-fluoro-adenosine-3'-phosphate
  modified_base 9: mod_base = OTHER; note = 2'-deoxy-2'-fluoro-uridine-3'-phosphate
  modified_base 10: mod_base = OTHER; note = 2'-O-methyl-uridine-3'-phosphate
  modified_base 11: mod_base = OTHER; note = 2'-O-methyl-adenosine-3'-phosphate
  modified_base 12: mod_base = OTHER; note = 2'-O-methyl-adenosine-3'-phosphate
  modified_base 13: mod_base = OTHER; note = 2'-O-methyl-cytidine-3'-phosphate
  modified_base 14: mod_base = OTHER; note = 2'-deoxy-2'-fluoro-cytidine-3'-phosphate
  modified_base 15: mod_base = OTHER; note = 2'-O-methyl-adenosine-3'-phosphate
  modified_base 16: mod_base = OTHER; note = 2'-deoxy-2'-fluoro-cytidine-3'-phosphate
  modified_base 17: mod_base = OTHER; note = 2'-O-methyl-cytidine-3'-phosphate
  modified_base 18: mod_base = OTHER; note = 2'-O-methyl-adenosine-3'-phosphate
  modified_base 19: mod_base = OTHER; note = 2'-O-methyl-guanosine-3'-phosphorothioate
  modified_base 20: mod_base = OTHER; note = 2'-O-methyl-uridine-3'-phosphorothioate
  modified_base 21: mod_base = OTHER; note = 2'-O-methyl-uridine-3'-phosphate
gtcacatattaaccaccagtt

SEQ ID NO: 1938 - RNA, 21 nt, synthetic construct
  source 1..21: mol_type = other RNA
  modified_base 1: mod_base = OTHER; note = 2'-O-methyl-adenosine-3'-phosphorothioate
  modified_base 2: mod_base = OTHER; note = 2'-deoxy-2'-fluoro-uridine-3'-phosphorothioate
  modified_base 3: mod_base = OTHER; note = 2'-O-methyl-uridine-3'-phosphate
  modified_base 4: mod_base = OTHER; note = 2'-O-methyl-uridine-3'-phosphate
  modified_base 5: mod_base = OTHER; note = 2'-O-methyl-uridine-3'-phosphate
  modified_base 6: mod_base = OTHER; note = 2'-deoxy-2'-fluoro-guanosine-3'-phosphate
  modified_base 7: mod_base = OTHER; note = 2'-O-methyl-cytidine-3'-phosphate
  modified_base 8: mod_base = OTHER; note = 2'-deoxy-2'-fluoro-guanosine-3'-phosphate
  modified_base 9: mod_base = OTHER; note = 2'-deoxy-2'-fluoro-guanosine-3'-phosphate
  modified_base 10: mod_base = OTHER; note = 2'-O-methyl-adenosine-3'-phosphate
  modified_base 11: mod_base = OTHER; note = 2'-O-methyl-cytidine-3'-phosphate
  modified_base 12: mod_base = OTHER; note = 2'-O-methyl-cytidine-3'-phosphate
  modified_base 13: mod_base = OTHER; note = 2'-O-methyl-cytidine-3'-phosphate
  modified_base 14: mod_base = OTHER; note = 2'-deoxy-2'-fluoro-adenosine-3'-phosphate
  modified_base 15: mod_base = OTHER; note = 2'-O-methyl-cytidine-3'-phosphate
  modified_base 16: mod_base = OTHER; note = 2'-deoxy-2'-fluoro-guanosine-3'-phosphate
  modified_base 17: mod_base = OTHER; note = 2'-O-methyl-adenosine-3'-phosphate
  modified_base 18: mod_base = OTHER; note = 2'-O-methyl-adenosine-3'-phosphate
  modified_base 19: mod_base = OTHER; note = 2'-O-methyl-uridine-3'-phosphorothioate
  modified_base 20: mod_base = OTHER; note = 2'-O-methyl-uridine-3'-phosphorothioate
  modified_base 21: mod_base = OTHER; note = 2'-O-methyl-uridine-3'-phosphate
attttgcggacccacgaattt

SEQ ID NO: 1939 - RNA, 21 nt, synthetic construct
  source 1..21: mol_type = other RNA
  modified_base 1: mod_base = OTHER; note = 2'-O-methyl-uridine-3'-phosphorothioate
  modified_base 2: mod_base = OTHER; note = 2'-deoxy-2'-fluoro-adenosine-3'-phosphorothioate
  modified_base 3: mod_base = OTHER; note = 2'-O-methyl-cytidine-3'-phosphate
  modified_base 4: mod_base = OTHER; note = 2'-O-methyl-uridine-3'-phosphate
  modified_base 5: mod_base = OTHER; note = 2'-O-methyl-uridine-3'-phosphate
  modified_base 6: mod_base = OTHER; note = 2'-deoxy-2'-fluoro-uridine-3'-phosphate
  modified_base 7: mod_base = OTHER; note = 2'-O-methyl-adenosine-3'-phosphate
  modified_base 8: mod_base = OTHER; note = 2'-deoxy-2'-fluoro-uridine-3'-phosphate
  modified_base 9: mod_base = OTHER; note = 2'-deoxy-2'-fluoro-uridine-3'-phosphate
  modified_base 10: mod_base = OTHER; note = 2'-O-methyl-guanosine-3'-phosphate
  modified_base 11: mod_base = OTHER; note = 2'-O-methyl-uridine-3'-phosphate
  modified_base 12: mod_base = OTHER; note = 2'-O-methyl-adenosine-3'-phosphate
  modified_base 13: mod_base = OTHER; note = 2'-O-methyl-guanosine-3'-phosphate
  modified_base 14: mod_base = OTHER; note = 2'-deoxy-2'-fluoro-guanosine-3'-phosphate
  modified_base 15: mod_base = OTHER; note = 2'-O-methyl-adenosine-3'-phosphate
  modified_base 16: mod_base = OTHER; note = 2'-deoxy-2'-fluoro-adenosine-3'-phosphate
  modified_base 17: mod_base = OTHER; note = 2'-O-methyl-uridine-3'-phosphate
  modified_base 18: mod_base = OTHER; note = 2'-O-methyl-adenosine-3'-phosphate
  modified_base 19: mod_base = OTHER; note = 2'-O-methyl-uridine-3'-phosphorothioate
  modified_base 20: mod_base = OTHER; note = 2'-O-methyl-uridine-3'-phosphorothioate
  modified_base 21: mod_base = OTHER; note = 2'-O-methyl-uridine-3'-phosphate
tactttattgtaggaatattt

SEQ ID NO: 1940 - RNA, 21 nt, synthetic construct
  source 1..21: mol_type = other RNA
  modified_base 1: mod_base = OTHER; note = 2'-O-methyl-adenosine-3'-phosphorothioate
  modified_base 2: mod_base = OTHER; note = 2'-deoxy-2'-fluoro-adenosine-3'-phosphorothioate
  modified_base 3: mod_base = OTHER; note = 2'-O-methyl-adenosine-3'-phosphate
  modified_base 4: mod_base = OTHER; note = 2'-O-methyl-adenosine-3'-phosphate
  modified_base 5: mod_base = OTHER; note = 2'-O-methyl-uridine-3'-phosphate
  modified_base 6: mod_base = OTHER; note = 2'-deoxy-2'-fluoro-adenosine-3'-phosphate
  modified_base 7: mod_base = OTHER; note = 2'-O-methyl-guanosine-3'-phosphate
  modified_base 8: mod_base = OTHER; note = 2'-deoxy-2'-fluoro-cytidine-3'-phosphate
  modified_base 9: mod_base = OTHER; note = 2'-deoxy-2'-fluoro-uridine-3'-phosphate
  modified_base 10: mod_base = OTHER; note = 2'-O-methyl-adenosine-3'-phosphate
  modified_base 11: mod_base = OTHER; note = 2'-O-methyl-uridine-3'-phosphate
  modified_base 12: mod_base = OTHER; note = 2'-O-methyl-adenosine-3'-phosphate
  modified_base 13: mod_base = OTHER; note = 2'-O-methyl-uridine-3'-phosphate
  modified_base 14: mod_base = OTHER; note = 2'-deoxy-2'-fluoro-cytidine-3'-phosphate
  modified_base 15: mod_base = OTHER; note = 2'-O-methyl-cytidine-3'-phosphate
  modified_base 16: mod_base = OTHER; note = 2'-deoxy-2'-fluoro-uridine-3'-phosphate
  modified_base 17: mod_base = OTHER; note = 2'-O-methyl-adenosine-3'-phosphate
  modified_base 18: mod_base = OTHER; note = 2'-O-methyl-uridine-3'-phosphate
  modified_base 19: mod_base = OTHER; note = 2'-O-methyl-uridine-3'-phosphorothioate
  modified_base 20: mod_base = OTHER; note = 2'-O-methyl-uridine-3'-phosphorothioate
  modified_base 21: mod_base = OTHER; note = 2'-O-methyl-uridine-3'-phosphate
aaaatagctatatcctatttt

SEQ ID NO: 1941 - RNA, 21 nt, synthetic construct
  source 1..21: mol_type = other RNA
  modified_base 1: mod_base = OTHER; note = 2'-O-methyl-uridine-3'-phosphorothioate
  modified_base 2: mod_base = OTHER; note = 2'-deoxy-2'-fluoro-adenosine-3'-phosphorothioate
  modified_base 3: mod_base = OTHER; note = 2'-O-methyl-guanosine-3'-phosphate
  modified_base 4: mod_base = OTHER; note = 2'-O-methyl-cytidine-3'-phosphate
  modified_base 5: mod_base = OTHER; note = 2'-O-methyl-uridine-3'-phosphate
  modified_base 6: mod_base = OTHER; note = 2'-deoxy-2'-fluoro-cytidine-3'-phosphate
  modified_base 7: mod_base = OTHER; note = 2'-O-methyl-adenosine-3'-phosphate
  modified_base 8: mod_base = OTHER; note = 2'-deoxy-2'-fluoro-guanosine-3'-phosphate
  modified_base 9: mod_base = OTHER; note = 2'-deoxy-2'-fluoro-uridine-3'-phosphate
  modified_base 10: mod_base = OTHER; note = 2'-O-methyl-adenosine-3'-phosphate
  modified_base 11: mod_base = OTHER; note = 2'-O-methyl-guanosine-3'-phosphate
  modified_base 12: mod_base = OTHER; note = 2'-O-methyl-adenosine-3'-phosphate
  modified_base 13: mod_base = OTHER; note = 2'-O-methyl-guanosine-3'-phosphate
  modified_base 14: mod_base = OTHER; note = 2'-deoxy-2'-fluoro-uridine-3'-phosphate
  modified_base 15: mod_base = OTHER; note = 2'-O-methyl-guanosine-3'-phosphate
  modified_base 16: mod_base = OTHER; note = 2'-deoxy-2'-fluoro-guanosine-3'-phosphate
  modified_base 17: mod_base = OTHER; note = 2'-O-methyl-adenosine-3'-phosphate
  modified_base 18: mod_base = OTHER; note = 2'-O-methyl-cytidine-3'-phosphate
  modified_base 19: mod_base = OTHER; note = 2'-O-methyl-uridine-3'-phosphorothioate
  modified_base 20: mod_base = OTHER; note = 2'-O-methyl-uridine-3'-phosphorothioate
  modified_base 21: mod_base = OTHER; note = 2'-O-methyl-uridine-3'-phosphate
tagctcagtagagtggacttt

SEQ ID NO: 1942 - RNA, 21 nt, synthetic construct
  source 1..21: mol_type = other RNA
  modified_base 1: mod_base = OTHER; note = 2'-O-methyl-adenosine-3'-phosphorothioate
  modified_base 2: mod_base = OTHER; note = 2'-deoxy-2'-fluoro-uridine-3'-phosphorothioate
  modified_base 3: mod_base = OTHER; note = 2'-O-methyl-uridine-3'-phosphate
  modified_base 4: mod_base = OTHER; note = 2'-O-methyl-adenosine-3'-phosphate
  modified_base 5: mod_base = OTHER; note = 2'-O-methyl-adenosine-3'-phosphate
  modified_base 6: mod_base = OTHER; note = 2'-deoxy-2'-fluoro-adenosine-3'-phosphate
  modified_base 7: mod_base = OTHER; note = 2'-O-methyl-adenosine-3'-phosphate
  modified_base 8: mod_base = OTHER; note = 2'-deoxy-2'-fluoro-uridine-3'-phosphate
  modified_base 9: mod_base = OTHER; note = 2'-deoxy-2'-fluoro-uridine-3'-phosphate
  modified_base 10: mod_base = OTHER; note = 2'-O-methyl-guanosine-3'-phosphate
  modified_base 11: mod_base = OTHER; note = 2'-O-methyl-uridine-3'-phosphate
  modified_base 12: mod_base = OTHER; note = 2'-O-methyl-uridine-3'-phosphate
  modified_base 13: mod_base = OTHER; note = 2'-O-methyl-guanosine-3'-phosphate
  modified_base 14: mod_base = OTHER; note = 2'-deoxy-2'-fluoro-guanosine-3'-phosphate
  modified_base 15: mod_base = OTHER; note = 2'-O-methyl-adenosine-3'-phosphate
  modified_base 16: mod_base = OTHER; note = 2'-deoxy-2'-fluoro-uridine-3'-phosphate
  modified_base 17: mod_base = OTHER; note = 2'-O-methyl-uridine-3'-phosphate
  modified_base 18: mod_base = OTHER; note = 2'-O-methyl-adenosine-3'-phosphate
  modified_base 19: mod_base = OTHER; note = 2'-O-methyl-uridine-3'-phosphorothioate
  modified_base 20: mod_base = OTHER; note = 2'-O-methyl-uridine-3'-phosphorothioate
  modified_base 21: mod_base = OTHER; note = 2'-O-methyl-uridine-3'-phosphate
attaaaattgttggattattt

SEQ ID NO: 1943 - RNA, 21 nt, synthetic construct
  source 1..21: mol_type = other RNA
  modified_base 1: mod_base = OTHER; note = 2'-O-methyl-cytidine-3'-phosphorothioate
  modified_base 2: mod_base = OTHER; note = 2'-deoxy-2'-fluoro-adenosine-3'-phosphorothioate
  modified_base 3: mod_base = OTHER; note = 2'-O-methyl-adenosine-3'-phosphate
  modified_base 4: mod_base = OTHER; note = 2'-O-methyl-uridine-3'-phosphate
  modified_base 5: mod_base = OTHER; note = 2'-O-methyl-adenosine-3'-phosphate
  modified_base 6: mod_base = OTHER; note = 2'-deoxy-2'-fluoro-uridine-3'-phosphate
  modified_base 7: mod_base = OTHER; note = 2'-O-methyl-uridine-3'-phosphate
  modified_base 8: mod_base = OTHER; note = 2'-deoxy-2'-fluoro-guanosine-3'-phosphate
  modified_base 9: mod_base = OTHER; note = 2'-deoxy-2'-fluoro-adenosine-3'-phosphate
  modified_base 10: mod_base = OTHER; note = 2'-O-methyl-uridine-3'-phosphate
  modified_base 11: mod_base = OTHER; note = 2'-O-methyl-guanosine-3'-phosphate
  modified_base 12: mod_base = OTHER; note = 2'-O-methyl-uridine-3'-phosphate
  modified_base 13: mod_base = OTHER; note = 2'-O-methyl-uridine-3'-phosphate
  modified_base 14: mod_base = OTHER; note = 2'-deoxy-2'-fluoro-adenosine-3'-phosphate
  modified_base 15: mod_base = OTHER; note = 2'-O-methyl-cytidine-3'-phosphate
  modified_base 16: mod_base = OTHER; note = 2'-deoxy-2'-fluoro-adenosine-3'-phosphate
  modified_base 17: mod_base = OTHER; note = 2'-O-methyl-uridine-3'-phosphate
  modified_base 18: mod_base = OTHER; note = 2'-O-methyl-adenosine-3'-phosphate
  modified_base 19: mod_base = OTHER; note = 2'-O-methyl-uridine-3'-phosphorothioate
  modified_base 20: mod_base = OTHER; note = 2'-O-methyl-uridine-3'-phosphorothioate
  modified_base 21: mod_base = OTHER; note = 2'-O-methyl-uridine-3'-phosphate
caatattgatgttacatattt

SEQ ID NO: 1944 - RNA, 21 nt, synthetic construct
  source 1..21: mol_type = other RNA
  modified_base 1: mod_base = OTHER; note = 2'-O-methyl-adenosine-3'-phosphorothioate
  modified_base 2: mod_base = OTHER; note = 2'-deoxy-2'-fluoro-guanosine-3'-phosphorothioate
  modified_base 3: mod_base = OTHER; note = 2'-O-methyl-uridine-3'-phosphate
  modified_base 4: mod_base = OTHER; note = 2'-O-methyl-adenosine-3'-phosphate
  modified_base 5: mod_base = OTHER; note = 2'-O-methyl-uridine-3'-phosphate
  modified_base 6: mod_base = OTHER; note = 2'-deoxy-2'-fluoro-cytidine-3'-phosphate
  modified_base 7: mod_base = OTHER; note = 2'-O-methyl-uridine-3'-phosphate
  modified_base 8: mod_base = OTHER; note = 2'-deoxy-2'-fluoro-cytidine-3'-phosphate
  modified_base 9: mod_base = OTHER; note = 2'-deoxy-2'-fluoro-uridine-3'-phosphate
  modified_base 10: mod_base = OTHER; note = 2'-O-methyl-cytidine-3'-phosphate
  modified_base 11: mod_base = OTHER; note = 2'-O-methyl-adenosine-3'-phosphate
  modified_base 12: mod_base = OTHER; note = 2'-O-methyl-uridine-3'-phosphate
  modified_base 13: mod_base = OTHER; note = 2'-O-methyl-guanosine-3'-phosphate
  modified_base 14: mod_base = OTHER; note = 2'-deoxy-2'-fluoro-guanosine-3'-phosphate
  modified_base 15: mod_base = OTHER; note = 2'-O-methyl-guanosine-3'-phosphate
  modified_base 16: mod_base = OTHER; note = 2'-deoxy-2'-fluoro-uridine-3'-phosphate
  modified_base 17: mod_base = OTHER; note = 2'-O-methyl-uridine-3'-phosphate
  modified_base 18: mod_base = OTHER; note = 2'-O-methyl-cytidine-3'-phosphate
  modified_base 19: mod_base = OTHER; note = 2'-O-methyl-adenosine-3'-phosphorothioate
  modified_base 20: mod_base = OTHER; note = 2'-O-methyl-uridine-3'-phosphorothioate
  modified_base 21: mod_base = OTHER; note = 2'-O-methyl-uridine-3'-phosphate
agtatctctcatgggttcatt

SEQ ID NO: 1945 - RNA, 21 nt, synthetic construct
  source 1..21: mol_type = other RNA
  modified_base 1: mod_base = OTHER; note = 2'-O-methyl-adenosine-3'-phosphorothioate
  modified_base 2: mod_base = OTHER; note = 2'-deoxy-2'-fluoro-guanosine-3'-phosphorothioate
  modified_base 3: mod_base = OTHER; note = 2'-O-methyl-uridine-3'-phosphate
  modified_base 4: mod_base = OTHER; note = 2'-O-methyl-guanosine-3'-phosphate
  modified_base 5: mod_base = OTHER; note = 2'-O-methyl-cytidine-3'-phosphate
  modified_base 6: mod_base = OTHER; note = 2'-deoxy-2'-fluoro-cytidine-3'-phosphate
  modified_base 7: mod_base = OTHER; note = 2'-O-methyl-cytidine-3'-phosphate
  modified_base 8: mod_base = OTHER; note = 2'-deoxy-2'-fluoro-uridine-3'-phosphate
  modified_base 9: mod_base = OTHER; note = 2'-deoxy-2'-fluoro-guanosine-3'-phosphate
  modified_base 10: mod_base = OTHER; note = 2'-O-methyl-uridine-3'-phosphate
  modified_base 11: mod_base = OTHER; note = 2'-O-methyl-adenosine-3'-phosphate
  modified_base 12: mod_base = OTHER; note = 2'-O-methyl-adenosine-3'-phosphate
  modified_base 13: mod_base = OTHER; note = 2'-O-methyl-adenosine-3'-phosphate
  modified_base 14: mod_base = OTHER; note = 2'-deoxy-2'-fluoro-uridine-3'-phosphate
  modified_base 15: mod_base = OTHER; note = 2'-O-methyl-uridine-3'-phosphate
  modified_base 16: mod_base = OTHER; note = 2'-deoxy-2'-fluoro-adenosine-3'-phosphate
  modified_base 17: mod_base = OTHER; note = 2'-O-methyl-adenosine-3'-phosphate
  modified_base 18: mod_base = OTHER; note = 2'-O-methyl-guanosine-3'-phosphate
  modified_base 19: mod_base = OTHER; note = 2'-O-methyl-adenosine-3'-phosphorothioate
  modified_base 20: mod_base = OTHER; note = 2'-O-methyl-uridine-3'-phosphorothioate
  modified_base 21: mod_base = OTHER; note = 2'-O-methyl-uridine-3'-phosphate
agtgccctgtaaattaagatt

SEQ ID NO: 1946 - RNA, 21 nt, synthetic construct
  source 1..21: mol_type = other RNA
  modified_base 1: mod_base = OTHER; note = 2'-O-methyl-uridine-3'-phosphorothioate
  modified_base 2: mod_base = OTHER; note = 2'-deoxy-2'-fluoro-adenosine-3'-phosphorothioate
  modified_base 3: mod_base = OTHER; note = 2'-O-methyl-guanosine-3'-phosphate
  modified_base 4: mod_base = OTHER; note = 2'-O-methyl-uridine-3'-phosphate
  modified_base 5: mod_base = OTHER; note = 2'-O-methyl-guanosine-3'-phosphate
  modified_base 6: mod_base = OTHER; note = 2'-deoxy-2'-fluoro-cytidine-3'-phosphate
  modified_base 7: mod_base = OTHER; note = 2'-O-methyl-cytidine-3'-phosphate
  modified_base 8: mod_base = OTHER; note = 2'-deoxy-2'-fluoro-cytidine-3'-phosphate
  modified_base 9: mod_base = OTHER; note = 2'-deoxy-2'-fluoro-uridine-3'-phosphate
  modified_base 10: mod_base = OTHER; note = 2'-O-methyl-guanosine-3'-phosphate
  modified_base 11: mod_base = OTHER; note = 2'-O-methyl-uridine-3'-phosphate
  modified_base 12: mod_base = OTHER; note = 2'-O-methyl-adenosine-3'-phosphate
  modified_base 13: mod_base = OTHER; note = 2'-O-methyl-adenosine-3'-phosphate
  modified_base 14: mod_base = OTHER; note = 2'-deoxy-2'-fluoro-adenosine-3'-phosphate
  modified_base 15: mod_base = OTHER; note = 2'-O-methyl-uridine-3'-phosphate
  modified_base 16: mod_base = OTHER; note = 2'-deoxy-2'-fluoro-uridine-3'-phosphate
  modified_base 17: mod_base = OTHER; note = 2'-O-methyl-adenosine-3'-phosphate
  modified_base 18: mod_base = OTHER; note = 2'-O-methyl-adenosine-3'-phosphate
  modified_base 19: mod_base = OTHER; note = 2'-O-methyl-guanosine-3'-phosphorothioate
  modified_base 20: mod_base = OTHER; note = 2'-O-methyl-uridine-3'-phosphorothioate
  modified_base 21: mod_base = OTHER; note = 2'-O-methyl-uridine-3'-phosphate
tagtgccctgtaaattaagtt

SEQ ID NO: 1947 - RNA, 21 nt, synthetic construct
  source 1..21: mol_type = other RNA
  modified_base 1: mod_base = OTHER; note = 2'-O-methyl-adenosine-3'-phosphorothioate
  modified_base 2: mod_base = OTHER; note = 2'-deoxy-2'-fluoro-uridine-3'-phosphorothioate
  modified_base 3: mod_base = OTHER; note = 2'-O-methyl-uridine-3'-phosphate
  modified_base 4: mod_base = OTHER; note = 2'-O-methyl-guanosine-3'-phosphate
  modified_base 5: mod_base = OTHER; note = 2'-O-methyl-adenosine-3'-phosphate
  modified_base 6: mod_base = OTHER; note = 2'-deoxy-2'-fluoro-uridine-3'-phosphate
  modified_base 7: mod_base = OTHER; note = 2'-O-methyl-adenosine-3'-phosphate
  modified_base 8: mod_base = OTHER; note = 2'-deoxy-2'-fluoro-adenosine-3'-phosphate
  modified_base 9: mod_base = OTHER; note = 2'-deoxy-2'-fluoro-adenosine-3'-phosphate
  modified_base 10: mod_base = OTHER; note = 2'-O-methyl-uridine-3'-phosphate
  modified_base 11: mod_base = OTHER; note = 2'-O-methyl-adenosine-3'-phosphate
  modified_base 12: mod_base = OTHER; note = 2'-O-methyl-guanosine-3'-phosphate
  modified_base 13: mod_base = OTHER; note = 2'-O-methyl-adenosine-3'-phosphate
  modified_base 14: mod_base = OTHER; note = 2'-deoxy-2'-fluoro-uridine-3'-phosphate
  modified_base 15: mod_base = OTHER; note = 2'-O-methyl-uridine-3'-phosphate
  modified_base 16: mod_base = OTHER; note = 2'-deoxy-2'-fluoro-cytidine-3'-phosphate
  modified_base 17: mod_base = OTHER; note = 2'-O-methyl-uridine-3'-phosphate
  modified_base 18: mod_base = OTHER; note = 2'-O-methyl-guanosine-3'-phosphate
  modified_base 19: mod_base = OTHER; note = 2'-O-methyl-uridine-3'-phosphorothioate
  modified_base 20: mod_base = OTHER; note = 2'-O-methyl-uridine-3'-phosphorothioate
  modified_base 21: mod_base = OTHER; note = 2'-O-methyl-uridine-3'-phosphate
attgataaatagattctgttt

SEQ ID NO: 1948 - RNA, 21 nt, synthetic construct
  source 1..21: mol_type = other RNA
  modified_base 1: mod_base = OTHER; note = 2'-O-methyl-uridine-3'-phosphorothioate
  modified_base 2: mod_base = OTHER; note = 2'-deoxy-2'-fluoro-adenosine-3'-phosphorothioate
  modified_base 3: mod_base = OTHER; note = 2'-O-methyl-guanosine-3'-phosphate
  modified_base 4: mod_base = OTHER; note = 2'-O-methyl-uridine-3'-phosphate
  modified_base 5: mod_base = OTHER; note = 2'-O-methyl-adenosine-3'-phosphate
  modified_base 6: mod_base = OTHER; note = 2'-deoxy-2'-fluoro-uridine-3'-phosphate
  modified_base 7: mod_base = OTHER; note = 2'-O-methyl-uridine-3'-phosphate
  modified_base 8: mod_base = OTHER; note = 2'-deoxy-2'-fluoro-cytidine-3'-phosphate
  modified_base 9: mod_base = OTHER; note = 2'-deoxy-2'-fluoro-uridine-3'-phosphate
  modified_base 10: mod_base = OTHER; note = 2'-O-methyl-guanosine-3'-phosphate
  modified_base 11: mod_base = OTHER; note = 2'-O-methyl-uridine-3'-phosphate
  modified_base 12: mod_base = OTHER; note = 2'-O-methyl-adenosine-3'-phosphate
  modified_base 13: mod_base = OTHER; note = 2'-O-methyl-adenosine-3'-phosphate
  modified_base 14: mod_base = OTHER; note = 2'-deoxy-2'-fluoro-uridine-3'-phosphate
  modified_base 15: mod_base = OTHER; note = 2'-O-methyl-cytidine-3'-phosphate
  modified_base 16: mod_base = OTHER; note = 2'-deoxy-2'-fluoro-cytidine-3'-phosphate
  modified_base 17: mod_base = OTHER; note = 2'-O-methyl-uridine-3'-phosphate
  modified_base 18: mod_base = OTHER; note = 2'-O-methyl-cytidine-3'-phosphate
  modified_base 19: mod_base = OTHER; note = 2'-O-methyl-adenosine-3'-phosphorothioate
  modified_base 20: mod_base = OTHER; note = 2'-O-methyl-uridine-3'-phosphorothioate
  modified_base 21: mod_base = OTHER; note = 2'-O-methyl-uridine-3'-phosphate
tagtattctgtaatcctcatt

SEQ ID NO: 1949 - RNA, 21 nt, synthetic construct
  source 1..21: mol_type = other RNA
  modified_base 1: mod_base = OTHER; note = 2'-O-methyl-adenosine-3'-phosphorothioate
  modified_base 2: mod_base = OTHER; note = 2'-deoxy-2'-fluoro-adenosine-3'-phosphorothioate
  modified_base 3: mod_base = OTHER; note = 2'-O-methyl-uridine-3'-phosphate
  modified_base 4: mod_base = OTHER; note = 2'-O-methyl-adenosine-3'-phosphate
  modified_base 5: mod_base = OTHER; note = 2'-O-methyl-cytidine-3'-phosphate
  modified_base 6: mod_base = OTHER; note = 2'-deoxy-2'-fluoro-uridine-3'-phosphate
  modified_base 7: mod_base = OTHER; note = 2'-O-methyl-uridine-3'-phosphate
  modified_base 8: mod_base = OTHER; note = 2'-deoxy-2'-fluoro-adenosine-3'-phosphate
  modified_base 9: mod_base = OTHER; note = 2'-deoxy-2'-fluoro-guanosine-3'-phosphate
  modified_base 10: mod_base = OTHER; note = 2'-O-methyl-uridine-3'-phosphate
  modified_base 11: mod_base = OTHER; note = 2'-O-methyl-adenosine-3'-phosphate
  modified_base 12: mod_base = OTHER; note = 2'-O-methyl-uridine-3'-phosphate
  modified_base 13: mod_base = OTHER; note = 2'-O-methyl-uridine-3'-phosphate
  modified_base 14: mod_base = OTHER; note = 2'-deoxy-2'-fluoro-adenosine-3'-phosphate
  modified_base 15: mod_base = OTHER; note = 2'-O-methyl-adenosine-3'-phosphate
  modified_base 16: mod_base = OTHER; note = 2'-deoxy-2'-fluoro-adenosine-3'-phosphate
  modified_base 17: mod_base = OTHER; note = 2'-O-methyl-guanosine-3'-phosphate
  modified_base 18: mod_base = OTHER; note = 2'-O-methyl-adenosine-3'-phosphate
  modified_base 19: mod_base = OTHER; note = 2'-O-methyl-adenosine-3'-phosphorothioate
  modified_base 20: mod_base = OTHER; note = 2'-O-methyl-uridine-3'-phosphorothioate
  modified_base 21: mod_base = OTHER; note = 2'-O-methyl-uridine-3'-phosphate
aatacttagtattaaagaatt

SEQ ID NO: 1950 - RNA, 21 nt, synthetic construct
  source 1..21: mol_type = other RNA
  modified_base 1: mod_base = OTHER; note = 2'-O-methyl-adenosine-3'-phosphorothioate
  modified_base 2: mod_base = OTHER; note = 2'-deoxy-2'-fluoro-uridine-3'-phosphorothioate
  modified_base 3: mod_base = OTHER; note = 2'-O-methyl-uridine-3'-phosphate
  modified_base 4: mod_base = OTHER; note = 2'-O-methyl-adenosine-3'-phosphate
  modified_base 5: mod_base = OTHER; note = 2'-O-methyl-guanosine-3'-phosphate
  modified_base 6: mod_base = OTHER; note = 2'-deoxy-2'-fluoro-uridine-3'-phosphate
  modified_base 7: mod_base = OTHER; note = 2'-O-methyl-uridine-3'-phosphate
  modified_base 8: mod_base = OTHER; note = 2'-deoxy-2'-fluoro-adenosine-3'-phosphate
  modified_base 9: mod_base = OTHER; note = 2'-deoxy-2'-fluoro-adenosine-3'-phosphate
  modified_base 10: mod_base = OTHER; note = 2'-O-methyl-uridine-3'-phosphate
  modified_base 11: mod_base = OTHER; note = 2'-O-methyl-adenosine-3'-phosphate
  modified_base 12: mod_base = OTHER; note = 2'-O-methyl-uridine-3'-phosphate
  modified_base 13: mod_base = OTHER; note = 2'-O-methyl-uridine-3'-phosphate
  modified_base 14: mod_base = OTHER; note = 2'-deoxy-2'-fluoro-uridine-3'-phosphate
  modified_base 15: mod_base = OTHER; note = 2'-O-methyl-guanosine-3'-phosphate
  modified_base 16: mod_base = OTHER; note = 2'-deoxy-2'-fluoro-guanosine-3'-phosphate
  modified_base 17: mod_base = OTHER; note = 2'-O-methyl-adenosine-3'-phosphate
  modified_base 18: mod_base = OTHER; note = 2'-O-methyl-guanosine-3'-phosphate
  modified_base 19: mod_base = OTHER; note = 2'-O-methyl-adenosine-3'-phosphorothioate
  modified_base 20: mod_base = OTHER; note = 2'-O-methyl-uridine-3'-phosphorothioate
  modified_base 21: mod_base = OTHER; note = 2'-O-methyl-uridine-3'-phosphate
attagttaatatttggagatt

SEQ ID NO: 1951 - RNA, 21 nt, synthetic construct
  source 1..21: mol_type = other RNA
  modified_base 1: mod_base = OTHER; note = 2'-O-methyl-guanosine-3'-phosphorothioate
  modified_base 2: mod_base = OTHER; note = 2'-deoxy-2'-fluoro-uridine-3'-phosphorothioate
  modified_base 3: mod_base = OTHER; note = 2'-O-methyl-uridine-3'-phosphate
  modified_base 4: mod_base = OTHER; note = 2'-O-methyl-adenosine-3'-phosphate
  modified_base 5: mod_base = OTHER; note = 2'-O-methyl-adenosine-3'-phosphate
  modified_base 6: mod_base = OTHER; note = 2'-deoxy-2'-fluoro-uridine-3'-phosphate
  modified_base 7: mod_base = OTHER; note = 2'-O-methyl-uridine-3'-phosphate
  modified_base 8: mod_base = OTHER; note = 2'-deoxy-2'-fluoro-adenosine-3'-phosphate
  modified_base 9: mod_base = OTHER; note = 2'-deoxy-2'-fluoro-cytidine-3'-phosphate
  modified_base 10: mod_base = OTHER; note = 2'-O-methyl-adenosine-3'-phosphate
  modified_base 11: mod_base = OTHER; note = 2'-O-methyl-cytidine-3'-phosphate
  modified_base 12: mod_base = OTHER; note = 2'-O-methyl-adenosine-3'-phosphate
  modified_base 13: mod_base = OTHER; note = 2'-O-methyl-uridine-3'-phosphate
  modified_base 14: mod_base = OTHER; note = 2'-deoxy-2'-fluoro-cytidine-3'-phosphate
  modified_base 15: mod_base = OTHER; note = 2'-O-methyl-cytidine-3'-phosphate
  modified_base 16: mod_base = OTHER; note = 2'-deoxy-2'-fluoro-uridine-3'-phosphate
  modified_base 17: mod_base = OTHER; note = 2'-O-methyl-cytidine-3'-phosphate
  modified_base 18: mod_base = OTHER; note = 2'-O-methyl-uridine-3'-phosphate
  modified_base 19: mod_base = OTHER; note = 2'-O-methyl-adenosine-3'-phosphorothioate
  modified_base 20: mod_base = OTHER; note = 2'-O-methyl-uridine-3'-phosphorothioate
  modified_base 21: mod_base = OTHER; note = 2'-O-methyl-uridine-3'-phosphate
gttaattacacatcctctatt

SEQ ID NO: 1952 - RNA, 21 nt, synthetic construct
  source 1..21: mol_type = other RNA
  modified_base 1: mod_base = OTHER; note = 2'-O-methyl-adenosine-3'-phosphorothioate
  modified_base 2: mod_base = OTHER; note = 2'-deoxy-2'-fluoro-cytidine-3'-phosphorothioate
  modified_base 3: mod_base = OTHER; note = 2'-O-methyl-uridine-3'-phosphate
  modified_base 4: mod_base = OTHER; note = 2'-O-methyl-uridine-3'-phosphate
  modified_base 5: mod_base = OTHER; note = 2'-O-methyl-uridine-3'-phosphate
  modified_base 6: mod_base = OTHER; note = 2'-deoxy-2'-fluoro-adenosine-3'-phosphate
  modified_base 7: mod_base = OTHER; note = 2'-O-methyl-guanosine-3'-phosphate
  modified_base 8: mod_base = OTHER; note = 2'-deoxy-2'-fluoro-uridine-3'-phosphate
  modified_base 9: mod_base = OTHER; note = 2'-deoxy-2'-fluoro-cytidine-3'-phosphate
  modified_base 10: mod_base = OTHER; note = 2'-O-methyl-adenosine-3'-phosphate
  modified_base 11: mod_base = OTHER; note = 2'-O-methyl-adenosine-3'-phosphate
  modified_base 12: mod_base = OTHER; note = 2'-O-methyl-cytidine-3'-phosphate
  modified_base 13: mod_base = OTHER; note = 2'-O-methyl-uridine-3'-phosphate
  modified_base 14: mod_base = OTHER; note = 2'-deoxy-2'-fluoro-uridine-3'-phosphate
  modified_base 15: mod_base = OTHER; note = 2'-O-methyl-adenosine-3'-phosphate
  modified_base 16: mod_base = OTHER; note = 2'-deoxy-2'-fluoro-adenosine-3'-phosphate
  modified_base 17: mod_base = OTHER; note = 2'-O-methyl-adenosine-3'-phosphate
  modified_base 18: mod_base = OTHER; note = 2'-O-methyl-uridine-3'-phosphate
  modified_base 19: mod_base = OTHER; note = 2'-O-methyl-uridine-3'-phosphorothioate
  modified_base 20: mod_base = OTHER; note = 2'-O-methyl-uridine-3'-phosphorothioate
  modified_base 21: mod_base = OTHER; note = 2'-O-methyl-uridine-3'-phosphate
actttagtcaacttaaatttt

SEQ ID NO: 1953 - RNA, 21 nt, synthetic construct
  source 1..21: mol_type = other RNA
  modified_base 1: mod_base = OTHER; note = 2'-O-methyl-guanosine-3'-phosphorothioate
  modified_base 2: mod_base = OTHER; note = 2'-deoxy-2'-fluoro-uridine-3'-phosphorothioate
  modified_base 3: mod_base = OTHER; note = 2'-O-methyl-adenosine-3'-phosphate
  modified_base 4: mod_base = OTHER; note = 2'-O-methyl-uridine-3'-phosphate
  modified_base 5: mod_base = OTHER; note = 2'-O-methyl-uridine-3'-phosphate
  modified_base 6: mod_base = OTHER; note = 2'-deoxy-2'-fluoro-cytidine-3'-phosphate
  modified_base 7: mod_base = OTHER; note = 2'-O-methyl-uridine-3'-phosphate
  modified_base 8: mod_base = OTHER; note = 2'-deoxy-2'-fluoro-guanosine-3'-phosphate
  modified_base 9: mod_base = OTHER; note = 2'-deoxy-2'-fluoro-uridine-3'-phosphate
  modified_base 10: mod_base = OTHER; note = 2'-O-methyl-adenosine-3'-phosphate
  modified_base 11: mod_base = OTHER; note = 2'-O-methyl-adenosine-3'-phosphate
  modified_base 12: mod_base = OTHER; note = 2'-O-methyl-uridine-3'-phosphate
  modified_base 13: mod_base = OTHER; note = 2'-O-methyl-cytidine-3'-phosphate
  modified_base 14: mod_base = OTHER; note = 2'-deoxy-2'-fluoro-cytidine-3'-phosphate
  modified_base 15: mod_base = OTHER; note = 2'-O-methyl-uridine-3'-phosphate
  modified_base 16: mod_base = OTHER; note = 2'-deoxy-2'-fluoro-cytidine-3'-phosphate
  modified_base 17: mod_base = OTHER; note = 2'-O-methyl-adenosine-3'-phosphate
  modified_base 18: mod_base = OTHER; note = 2'-O-methyl-cytidine-3'-phosphate
  modified_base 19: mod_base = OTHER; note = 2'-O-methyl-adenosine-3'-phosphorothioate
  modified_base 20: mod_base = OTHER; note = 2'-O-methyl-uridine-3'-phosphorothioate
  modified_base 21: mod_base = OTHER; note = 2'-O-methyl-uridine-3'-phosphate
gtattctgtaatcctcacatt

SEQ ID NO: 1954 - RNA, 21 nt, synthetic construct
  source 1..21: mol_type = other RNA
  modified_base 1: mod_base = OTHER; note = 2'-O-methyl-guanosine-3'-phosphorothioate
  modified_base 2: mod_base = OTHER; note = 2'-deoxy-2'-fluoro-adenosine-3'-phosphorothioate
  modified_base 3: mod_base = OTHER; note = 2'-O-methyl-guanosine-3'-phosphate
  modified_base 4: mod_base = OTHER; note = 2'-O-methyl-uridine-3'-phosphate
  modified_base 5: mod_base = OTHER; note = 2'-O-methyl-adenosine-3'-phosphate
  modified_base 6: mod_base = OTHER; note = 2'-deoxy-2'-fluoro-uridine-3'-phosphate
  modified_base 7: mod_base = OTHER; note = 2'-O-methyl-uridine-3'-phosphate
  modified_base 8: mod_base = OTHER; note = 2'-deoxy-2'-fluoro-guanosine-3'-phosphate
  modified_base 9: mod_base = OTHER; note = 2'-deoxy-2'-fluoro-uridine-3'-phosphate
  modified_base 10: mod_base = OTHER; note = 2'-O-methyl-guanosine-3'-phosphate
  modified_base 11: mod_base = OTHER; note = 2'-O-methyl-uridine-3'-phosphate
  modified_base 12: mod_base = OTHER; note = 2'-O-methyl-uridine-3'-phosphate
  modified_base 13: mod_base = OTHER; note = 2'-O-methyl-guanosine-3'-phosphate
  modified_base 14: mod_base = OTHER; note = 2'-deoxy-2'-fluoro-uridine-3'-phosphate
  modified_base 15: mod_base = OTHER; note = 2'-O-methyl-adenosine-3'-phosphate
  modified_base 16: mod_base = OTHER; note = 2'-deoxy-2'-fluoro-uridine-3'-phosphate
  modified_base 17: mod_base = OTHER; note = 2'-O-methyl-guanosine-3'-phosphate
  modified_base 18: mod_base = OTHER; note = 2'-O-methyl-adenosine-3'-phosphate
  modified_base 19: mod_base = OTHER; note = 2'-O-methyl-adenosine-3'-phosphorothioate
  modified_base 20: mod_base = OTHER; note = 2'-O-methyl-uridine-3'-phosphorothioate
  modified_base 21: mod_base = OTHER; note = 2'-O-methyl-uridine-3'-phosphate
gagtattgtgttgtatgaatt

SEQ ID NO: 1955 - RNA, 21 nt, synthetic construct
  source 1..21: mol_type = other RNA
  modified_base 1: mod_base = OTHER; note = 2'-O-methyl-adenosine-3'-phosphorothioate
  modified_base 2: mod_base = OTHER; note = 2'-deoxy-2'-fluoro-adenosine-3'-phosphorothioate
  modified_base 3: mod_base = OTHER; note = 2'-O-methyl-uridine-3'-phosphate
  modified_base 4: mod_base = OTHER; note = 2'-O-methyl-uridine-3'-phosphate
  modified_base 5: mod_base = OTHER; note = 2'-O-methyl-adenosine-3'-phosphate
  modified_base 6: mod_base = OTHER; note = 2'-deoxy-2'-fluoro-guanosine-3'-phosphate
  modified_base 7: mod_base = OTHER; note = 2'-O-methyl-uridine-3'-phosphate
  modified_base 8: mod_base = OTHER; note = 2'-deoxy-2'-fluoro-uridine-3'-phosphate
  modified_base 9: mod_base = OTHER; note = 2'-deoxy-2'-fluoro-adenosine-3'-phosphate
  modified_base 10: mod_base = OTHER; note = 2'-O-methyl-adenosine-3'-phosphate
  modified_base 11: mod_base = OTHER; note = 2'-O-methyl-uridine-3'-phosphate
  modified_base 12: mod_base = OTHER; note = 2'-O-methyl-adenosine-3'-phosphate
  modified_base 13: mod_base = OTHER; note = 2'-O-methyl-uridine-3'-phosphate
  modified_base 14: mod_base = OTHER; note = 2'-deoxy-2'-fluoro-uridine-3'-phosphate
  modified_base 15: mod_base = OTHER; note = 2'-O-methyl-uridine-3'-phosphate
  modified_base 16: mod_base = OTHER; note = 2'-deoxy-2'-fluoro-guanosine-3'-phosphate
  modified_base 17: mod_base = OTHER; note = 2'-O-methyl-guanosine-3'-phosphate
  modified_base 18: mod_base = OTHER; note = 2'-O-methyl-adenosine-3'-phosphate
  modified_base 19: mod_base = OTHER; note = 2'-O-methyl-guanosine-3'-phosphorothioate
  modified_base 20: mod_base = OTHER; note = 2'-O-methyl-uridine-3'-phosphorothioate
  modified_base 21: mod_base = OTHER; note = 2'-O-methyl-uridine-3'-phosphate
aattagttaatatttggagtt

SEQ ID NO: 1956 - RNA, 21 nt, synthetic construct
  source 1..21: mol_type = other RNA
  modified_base 1: mod_base = OTHER; note = 2'-O-methyl-uridine-3'-phosphorothioate
  modified_base 2: mod_base = OTHER; note = 2'-deoxy-2'-fluoro-uridine-3'-phosphorothioate
  modified_base 3: mod_base = OTHER; note = 2'-O-methyl-adenosine-3'-phosphate
  modified_base 4: mod_base = OTHER; note = 2'-O-methyl-guanosine-3'-phosphate
  modified_base 5: mod_base = OTHER; note = 2'-O-methyl-uridine-3'-phosphate
  modified_base 6: mod_base = OTHER; note = 2'-deoxy-2'-fluoro-adenosine-3'-phosphate
  modified_base 7: mod_base = OTHER; note = 2'-O-methyl-uridine-3'-phosphate
  modified_base 8: mod_base = OTHER; note = 2'-deoxy-2'-fluoro-adenosine-3'-phosphate
  modified_base 9: mod_base = OTHER; note = 2'-deoxy-2'-fluoro-uridine-3'-phosphate
  modified_base 10: mod_base = OTHER; note = 2'-O-methyl-uridine-3'-phosphate
  modified_base 11: mod_base = OTHER; note = 2'-O-methyl-adenosine-3'-phosphate
  modified_base 12: mod_base = OTHER; note = 2'-O-methyl-guanosine-3'-phosphate
  modified_base 13: mod_base = OTHER; note = 2'-O-methyl-uridine-3'-phosphate
  modified_base 14: mod_base = OTHER; note = 2'-deoxy-2'-fluoro-guanosine-3'-phosphate
  modified_base 15: mod_base = OTHER; note = 2'-O-methyl-adenosine-3'-phosphate
  modified_base 16: mod_base = OTHER; note = 2'-deoxy-2'-fluoro-uridine-3'-phosphate
  modified_base 17: mod_base = OTHER; note = 2'-O-methyl-adenosine-3'-phosphate
  modified_base 18: mod_base = OTHER; note = 2'-O-methyl-uridine-3'-phosphate
  modified_base 19: mod_base = OTHER; note = 2'-O-methyl-guanosine-3'-phosphorothioate
  modified_base 20: mod_base = OTHER; note = 2'-O-methyl-uridine-3'-phosphorothioate
  modified_base 21: mod_base = OTHER; note = 2'-O-methyl-uridine-3'-phosphate
ttagtatattagtgatatgtt

SEQ ID NO: 1957 - RNA, 21 nt, synthetic construct
  source 1..21: mol_type = other RNA
  modified_base 1: mod_base = OTHER; note = 2'-O-methyl-uridine-3'-phosphorothioate
  modified_base 2: mod_base = OTHER; note = 2'-deoxy-2'-fluoro-adenosine-3'-phosphorothioate
  modified_base 3: mod_base = OTHER; note = 2'-O-methyl-uridine-3'-phosphate
  modified_base 4: mod_base = OTHER; note = 2'-O-methyl-uridine-3'-phosphate
  modified_base 5: mod_base = OTHER; note = 2'-O-methyl-adenosine-3'-phosphate
  modified_base 6: mod_base = OTHER; note = 2'-deoxy-2'-fluoro-guanosine-3'-phosphate
  modified_base 7: mod_base = OTHER; note = 2'-O-methyl-uridine-3'-phosphate
  modified_base 8: mod_base = OTHER; note = 2'-deoxy-2'-fluoro-guanosine-3'-phosphate
  modified_base 9: mod_base = OTHER; note = 2'-deoxy-2'-fluoro-adenosine-3'-phosphate
  modified_base 10: mod_base = OTHER; note = 2'-O-methyl-uridine-3'-phosphate
  modified_base 11: mod_base = OTHER; note = 2'-O-methyl-adenosine-3'-phosphate
  modified_base 12: mod_base = OTHER; note = 2'-O-methyl-uridine-3'-phosphate
  modified_base 13: mod_base = OTHER; note = 2'-O-methyl-guanosine-3'-phosphate
  modified_base 14: mod_base = OTHER; note = 2'-deoxy-2'-fluoro-adenosine-3'-phosphate
  modified_base 15: mod_base = OTHER; note = 2'-O-methyl-cytidine-3'-phosphate
  modified_base 16: mod_base = OTHER; note = 2'-deoxy-2'-fluoro-uridine-3'-phosphate
  modified_base 17: mod_base = OTHER; note = 2'-O-methyl-adenosine-3'-phosphate
  modified_base 18: mod_base = OTHER; note = 2'-O-methyl-adenosine-3'-phosphate
  modified_base 19: mod_base = OTHER; note = 2'-O-methyl-uridine-3'-phosphorothioate
  modified_base 20: mod_base = OTHER; note = 2'-O-methyl-uridine-3'-phosphorothioate
  modified_base 21: mod_base = OTHER; note = 2'-O-methyl-uridine-3'-phosphate
tattagtgatatgactaattt

SEQ ID NO: 1958 - RNA, 21 nt, synthetic construct
  source 1..21: mol_type = other RNA
  modified_base 1: mod_base = OTHER; note = 2'-O-methyl-guanosine-3'-phosphorothioate
  modified_base 2: mod_base = OTHER; note = 2'-deoxy-2'-fluoro-adenosine-3'-phosphorothioate
  modified_base 3: mod_base = OTHER; note = 2'-O-methyl-adenosine-3'-phosphate
  modified_base 4: mod_base = OTHER; note = 2'-O-methyl-adenosine-3'-phosphate
  modified_base 5: mod_base = OTHER; note = 2'-O-methyl-uridine-3'-phosphate
  modified_base 6: mod_base = OTHER; note = 2'-deoxy-2'-fluoro-uridine-3'-phosphate
  modified_base 7: mod_base = OTHER; note = 2'-O-methyl-guanosine-3'-phosphate
  modified_base 8: mod_base = OTHER; note = 2'-deoxy-2'-fluoro-adenosine-3'-phosphate
  modified_base 9: mod_base = OTHER; note = 2'-deoxy-2'-fluoro-uridine-3'-phosphate
  modified_base 10: mod_base = OTHER; note = 2'-O-methyl-adenosine-3'-phosphate
  modified_base 11: mod_base = OTHER; note = 2'-O-methyl-adenosine-3'-phosphate
  modified_base 12: mod_base = OTHER; note = 2'-O-methyl-adenosine-3'-phosphate
  modified_base 13: mod_base = OTHER; note = 2'-O-methyl-uridine-3'-phosphate
  modified_base 14: mod_base = OTHER; note = 2'-deoxy-2'-fluoro-adenosine-3'-phosphate
  modified_base 15: mod_base = OTHER; note = 2'-O-methyl-guanosine-3'-phosphate
  modified_base 16: mod_base = OTHER; note = 2'-deoxy-2'-fluoro-adenosine-3'-phosphate
  modified_base 17: mod_base = OTHER; note = 2'-O-methyl-uridine-3'-phosphate
  modified_base 18: mod_base = OTHER; note = 2'-O-methyl-uridine-3'-phosphate
  modified_base 19: mod_base = OTHER; note = 2'-O-methyl-cytidine-3'-phosphorothioate
  modified_base 20: mod_base = OTHER; note = 2'-O-methyl-uridine-3'-phosphorothioate
  modified_base 21: mod_base = OTHER; note = 2'-O-methyl-uridine-3'-phosphate
gaaattgataaatagattctt

SEQ ID NO: 1959 - RNA, 21 nt, synthetic construct
  source 1..21: mol_type = other RNA
  modified_base 1: mod_base = OTHER; note = 2'-O-methyl-uridine-3'-phosphorothioate
  modified_base 2: mod_base = OTHER; note = 2'-deoxy-2'-fluoro-uridine-3'-phosphorothioate
  modified_base 3: mod_base = OTHER; note = 2'-O-methyl-adenosine-3'-phosphate
  modified_base 4: mod_base = OTHER; note = 2'-O-methyl-guanosine-3'-phosphate
  modified_base 5: mod_base = OTHER; note = 2'-O-methyl-adenosine-3'-phosphate
  modified_base 6: mod_base = OTHER; note = 2'-deoxy-2'-fluoro-adenosine-3'-phosphate
  modified_base 7: mod_base = OTHER; note = 2'-O-methyl-guanosine-3'-phosphate
  modified_base 8: mod_base = OTHER; note = 2'-deoxy-2'-fluoro-adenosine-3'-phosphate
  modified_base 9: mod_base = OTHER; note = 2'-deoxy-2'-fluoro-uridine-3'-phosphate
  modified_base 10: mod_base = OTHER; note = 2'-O-methyl-adenosine-3'-phosphate
  modified_base 11: mod_base = OTHER; note = 2'-O-methyl-uridine-3'-phosphate
  modified_base 12: mod_base = OTHER; note = 2'-O-methyl-guanosine-3'-phosphate
  modified_base 13: mod_base = OTHER; note = 2'-O-methyl-guanosine-3'-phosphate
  modified_base 14: mod_base = OTHER; note = 2'-deoxy-2'-fluoro-uridine-3'-phosphate
  modified_base 15: mod_base = OTHER; note = 2'-O-methyl-uridine-3'-phosphate
  modified_base 16: mod_base = OTHER; note = 2'-deoxy-2'-fluoro-adenosine-3'-phosphate
  modified_base 17: mod_base = OTHER; note = 2'-O-methyl-adenosine-3'-phosphate
  modified_base 18: mod_base = OTHER; note = 2'-O-methyl-uridine-3'-phosphate
  modified_base 19: mod_base = OTHER; note = 2'-O-methyl-uridine-3'-phosphorothioate
  modified_base 20: mod_base = OTHER; note = 2'-O-methyl-uridine-3'-phosphorothioate
  modified_base 21: mod_base = OTHER; note = 2'-O-methyl-uridine-3'-phosphate
ttagaagatatggttaatttt

SEQ ID NO: 1960 - RNA, 21 nt, synthetic construct
  source 1..21: mol_type = other RNA
  modified_base 1: mod_base = OTHER; note = 2'-O-methyl-uridine-3'-phosphorothioate
  modified_base 2: mod_base = OTHER; note = 2'-deoxy-2'-fluoro-uridine-3'-phosphorothioate
  modified_base 3: mod_base = OTHER; note = 2'-O-methyl-adenosine-3'-phosphate
  modified_base 4: mod_base = OTHER; note = 2'-O-methyl-adenosine-3'-phosphate
  modified_base 5: mod_base = OTHER; note = 2'-O-methyl-uridine-3'-phosphate
  modified_base 6: mod_base = OTHER; note = 2'-deoxy-2'-fluoro-uridine-3'-phosphate
  modified_base 7: mod_base = OTHER; note = 2'-O-methyl-adenosine-3'-phosphate
  modified_base 8: mod_base = OTHER; note = 2'-deoxy-2'-fluoro-cytidine-3'-phosphate
  modified_base 9: mod_base = OTHER; note = 2'-deoxy-2'-fluoro-adenosine-3'-phosphate
  modified_base 10: mod_base = OTHER; note = 2'-O-methyl-cytidine-3'-phosphate
  modified_base 11: mod_base = OTHER; note = 2'-O-methyl-adenosine-3'-phosphate
  modified_base 12: mod_base = OTHER; note = 2'-O-methyl-uridine-3'-phosphate
  modified_base 13: mod_base = OTHER; note = 2'-O-methyl-cytidine-3'-phosphate
  modified_base 14: mod_base = OTHER; note = 2'-deoxy-2'-fluoro-cytidine-3'-phosphate
  modified_base 15: mod_base = OTHER; note = 2'-O-methyl-uridine-3'-phosphate
  modified_base 16: mod_base = OTHER; note = 2'-deoxy-2'-fluoro-cytidine-3'-phosphate
  modified_base 17: mod_base = OTHER; note = 2'-O-methyl-uridine-3'-phosphate
  modified_base 18: mod_base = OTHER; note = 2'-O-methyl-adenosine-3'-phosphate
  modified_base 19: mod_base = OTHER; note = 2'-O-methyl-cytidine-3'-phosphorothioate
  modified_base 20: mod_base = OTHER; note = 2'-O-methyl-uridine-3'-phosphorothioate
  modified_base 21: mod_base = OTHER; note = 2'-O-methyl-uridine-3'-phosphate
ttaattacacatcctctactt

SEQ ID NO: 1961 - RNA, 21 nt, synthetic construct
  source 1..21: mol_type = other RNA
  modified_base 1: mod_base = OTHER; note = 2'-O-methyl-guanosine-3'-phosphorothioate
  modified_base 2: mod_base = OTHER; note = 2'-deoxy-2'-fluoro-uridine-3'-phosphorothioate
  modified_base 3: mod_base = OTHER; note = 2'-O-methyl-guanosine-3'-phosphate
  modified_base 4: mod_base = OTHER; note = 2'-O-methyl-adenosine-3'-phosphate
  modified_base 5: mod_base = OTHER; note = 2'-O-methyl-guanosine-3'-phosphate
  modified_base 6: mod_base = OTHER; note = 2'-deoxy-2'-fluoro-guanosine-3'-phosphate
  modified_base 7: mod_base = OTHER; note = 2'-O-methyl-uridine-3'-phosphate
  modified_base 8: mod_base = OTHER; note = 2'-deoxy-2'-fluoro-adenosine-3'-phosphate
  modified_base 9: mod_base = OTHER; note = 2'-deoxy-2'-fluoro-uridine-3'-phosphate
  modified_base 10: mod_base = OTHER; note = 2'-O-methyl-uridine-3'-phosphate
  modified_base 11: mod_base = OTHER; note = 2'-O-methyl-guanosine-3'-phosphate
  modified_base 12: mod_base = OTHER; note = 2'-O-methyl-guanosine-3'-phosphate
  modified_base 13: mod_base = OTHER; note = 2'-O-methyl-adenosine-3'-phosphate
  modified_base 14: mod_base = OTHER; note = 2'-deoxy-2'-fluoro-cytidine-3'-phosphate
  modified_base 15: mod_base = OTHER; note = 2'-O-methyl-uridine-3'-phosphate
  modified_base 16: mod_base = OTHER; note = 2'-deoxy-2'-fluoro-uridine-3'-phosphate
  modified_base 17: mod_base = OTHER; note = 2'-O-methyl-uridine-3'-phosphate
  modified_base 18: mod_base = OTHER; note = 2'-O-methyl-cytidine-3'-phosphate
  modified_base 19: mod_base = OTHER; note = 2'-O-methyl-uridine-3'-phosphorothioate
  modified_base 20: mod_base = OTHER; note = 2'-O-methyl-uridine-3'-phosphorothioate
  modified_base 21: mod_base = OTHER; note = 2'-O-methyl-uridine-3'-phosphate
gtgaggtattggactttcttt

SEQ ID NO: 1962 - RNA, 21 nt, synthetic construct
  source 1..21: mol_type = other RNA
  modified_base 1: mod_base = OTHER; note = 2'-O-methyl-adenosine-3'-phosphorothioate
  modified_base 2: mod_base = OTHER; note = 2'-deoxy-2'-fluoro-adenosine-3'-phosphorothioate
  modified_base 3: mod_base = OTHER; note = 2'-O-methyl-cytidine-3'-phosphate
  modified_base 4: mod_base = OTHER; note = 2'-O-methyl-uridine-3'-phosphate
  modified_base 5: mod_base = OTHER; note = 2'-O-methyl-uridine-3'-phosphate
  modified_base 6: mod_base = OTHER; note = 2'-deoxy-2'-fluoro-adenosine-3'-phosphate
  modified_base 7: mod_base = OTHER; note = 2'-O-methyl-adenosine-3'-phosphate
  modified_base 8: mod_base = OTHER; note = 2'-deoxy-2'-fluoro-adenosine-3'-phosphate
  modified_base 9: mod_base = OTHER; note = 2'-deoxy-2'-fluoro-uridine-3'-phosphate
  modified_base 10: mod_base = OTHER; note = 2'-O-methyl-uridine-3'-phosphate
  modified_base 11: mod_base = OTHER; note = 2'-O-methyl-adenosine-3'-phosphate
  modified_base 12: mod_base = OTHER; note = 2'-O-methyl-cytidine-3'-phosphate
  modified_base 13: mod_base = OTHER; note = 2'-O-methyl-cytidine-3'-phosphate
  modified_base 14: mod_base = OTHER; note = 2'-deoxy-2'-fluoro-adenosine-3'-phosphate
  modified_base 15: mod_base = OTHER; note = 2'-O-methyl-adenosine-3'-phosphate
  modified_base 16: mod_base = OTHER; note = 2'-deoxy-2'-fluoro-adenosine-3'-phosphate
  modified_base 17: mod_base = OTHER; note = 2'-O-methyl-guanosine-3'-phosphate
  modified_base 18: mod_base = OTHER; note = 2'-O-methyl-uridine-3'-phosphate
  modified_base 19: mod_base = OTHER; note = 2'-O-methyl-uridine-3'-phosphorothioate
  modified_base 20: mod_base = OTHER; note = 2'-O-methyl-uridine-3'-phosphorothioate
  modified_base 21: mod_base = OTHER; note = 2'-O-methyl-uridine-3'-phosphate
aacttaaattaccaaagtttt

SEQ ID NO: 1963 - RNA, 21 nt, synthetic construct
  source 1..21: mol_type = other RNA
  modified_base 1: mod_base = OTHER; note = 2'-O-methyl-uridine-3'-phosphorothioate
  modified_base 2: mod_base = OTHER; note = 2'-deoxy-2'-fluoro-uridine-3'-phosphorothioate
  modified_base 3: mod_base = OTHER; note = 2'-O-methyl-adenosine-3'-phosphate
  modified_base 4: mod_base = OTHER; note = 2'-O-methyl-guanosine-3'-phosphate
  modified_base 5: mod_base = OTHER; note = 2'-O-methyl-uridine-3'-phosphate
  modified_base 6: mod_base = OTHER; note = 2'-deoxy-2'-fluoro-uridine-3'-phosphate
  modified_base 7: mod_base = OTHER; note = 2'-O-methyl-adenosine-3'-phosphate
  modified_base 8: mod_base = OTHER; note = 2'-deoxy-2'-fluoro-adenosine-3'-phosphate
  modified_base 9: mod_base = OTHER; note = 2'-deoxy-2'-fluoro-uridine-3'-phosphate
  modified_base 10: mod_base = OTHER; note = 2'-O-methyl-adenosine-3'-phosphate
  modified_base 11: mod_base = OTHER; note = 2'-O-methyl-uridine-3'-phosphate
  modified_base 12: mod_base = OTHER; note = 2'-O-methyl-uridine-3'-phosphate
  modified_base 13: mod_base = OTHER; note = 2'-O-methyl-uridine-3'-phosphate
  modified_base 14: mod_base = OTHER; note = 2'-deoxy-2'-fluoro-guanosine-3'-phosphate
  modified_base 15: mod_base = OTHER; note = 2'-O-methyl-guanosine-3'-phosphate
  modified_base 16: mod_base = OTHER; note = 2'-deoxy-2'-fluoro-adenosine-3'-phosphate
  modified_base 17: mod_base = OTHER; note = 2'-O-methyl-guanosine-3'-phosphate
  modified_base 18: mod_base = OTHER; note = 2'-O-methyl-adenosine-3'-phosphate
  modified_base 19: mod_base = OTHER; note = 2'-O-methyl-guanosine-3'-phosphorothioate
  modified_base 20: mod_base = OTHER; note = 2'-O-methyl-uridine-3'-phosphorothioate
  modified_base 21: mod_base = OTHER; note = 2'-O-methyl-uridine-3'-phosphate
ttagttaatatttggagagtt

SEQ ID NO: 1964 - RNA, 21 nt, synthetic construct
  source 1..21: mol_type = other RNA
  modified_base 1: mod_base = OTHER; note = 2'-O-methyl-adenosine-3'-phosphorothioate
  modified_base 2: mod_base = OTHER; note = 2'-deoxy-2'-fluoro-guanosine-3'-phosphorothioate
  modified_base 3: mod_base = OTHER; note = 2'-O-methyl-adenosine-3'-phosphate
  modified_base 4: mod_base = OTHER; note = 2'-O-methyl-uridine-3'-phosphate
  modified_base 5: mod_base = OTHER; note = 2'-O-methyl-adenosine-3'-phosphate
  modified_base 6: mod_base = OTHER; note = 2'-deoxy-2'-fluoro-adenosine-3'-phosphate
  modified_base 7: mod_base = OTHER; note = 2'-O-methyl-guanosine-3'-phosphate
  modified_base 8: mod_base = OTHER; note = 2'-deoxy-2'-fluoro-adenosine-3'-phosphate
  modified_base 9: mod_base = OTHER; note = 2'-deoxy-2'-fluoro-adenosine-3'-phosphate
  modified_base 10: mod_base = OTHER; note = 2'-O-methyl-cytidine-3'-phosphate
  modified_base 11: mod_base = OTHER; note = 2'-O-methyl-uridine-3'-phosphate
  modified_base 12: mod_base = OTHER; note = 2'-O-methyl-uridine-3'-phosphate
  modified_base 13: mod_base = OTHER; note = 2'-O-methyl-adenosine-3'-phosphate
  modified_base 14: mod_base = OTHER; note = 2'-deoxy-2'-fluoro-uridine-3'-phosphate
  modified_base 15: mod_base = OTHER; note = 2'-O-methyl-uridine-3'-phosphate
  modified_base 16: mod_base = OTHER; note = 2'-deoxy-2'-fluoro-cytidine-3'-phosphate
  modified_base 17: mod_base = OTHER; note = 2'-O-methyl-uridine-3'-phosphate
  modified_base 18: mod_base = OTHER; note = 2'-O-methyl-adenosine-3'-phosphate
  modified_base 19: mod_base = OTHER; note = 2'-O-methyl-uridine-3'-phosphorothioate
  modified_base 20: mod_base = OTHER; note = 2'-O-methyl-uridine-3'-phosphorothioate
  modified_base 21: mod_base = OTHER; note = 2'-O-methyl-uridine-3'-phosphate
agataagaacttattctattt

SEQ ID NO: 1965 - RNA, 21 nt, synthetic construct
  source 1..21: mol_type = other RNA
  modified_base 1: mod_base = OTHER; note = 2'-O-methyl-uridine-3'-phosphorothioate
  modified_base 2: mod_base = OTHER; note = 2'-deoxy-2'-fluoro-guanosine-3'-phosphorothioate
  modified_base 3: mod_base = OTHER; note = 2'-O-methyl-uridine-3'-phosphate
  modified_base 4: mod_base = OTHER; note = 2'-O-methyl-uridine-3'-phosphate
  modified_base 5: mod_base = OTHER; note = 2'-O-methyl-adenosine-3'-phosphate
  modified_base 6: mod_base = OTHER; note = 2'-deoxy-2'-fluoro-guanosine-3'-phosphate
  modified_base 7: mod_base = OTHER; note = 2'-O-methyl-uridine-3'-phosphate
  modified_base 8: mod_base = OTHER; note = 2'-deoxy-2'-fluoro-adenosine-3'-phosphate
  modified_base 9: mod_base = OTHER; note = 2'-deoxy-2'-fluoro-uridine-3'-phosphate
  modified_base 10: mod_base = OTHER; note = 2'-O-methyl-adenosine-3'-phosphate
  modified_base 11: mod_base = OTHER; note = 2'-O-methyl-uridine-3'-phosphate
  modified_base 12: mod_base = OTHER; note = 2'-O-methyl-uridine-3'-phosphate
  modified_base 13: mod_base = OTHER; note = 2'-O-methyl-adenosine-3'-phosphate
  modified_base 14: mod_base = OTHER; note = 2'-deoxy-2'-fluoro-guanosine-3'-phosphate
  modified_base 15: mod_base = OTHER; note = 2'-O-methyl-uridine-3'-phosphate
  modified_base 16: mod_base = OTHER; note = 2'-deoxy-2'-fluoro-guanosine-3'-phosphate
  modified_base 17: mod_base = OTHER; note = 2'-O-methyl-adenosine-3'-phosphate
  modified_base 18: mod_base = OTHER; note = 2'-O-methyl-uridine-3'-phosphate
  modified_base 19: mod_base = OTHER; note = 2'-O-methyl-adenosine-3'-phosphorothioate
  modified_base 20: mod_base = OTHER; note = 2'-O-methyl-uridine-3'-phosphorothioate
  modified_base 21: mod_base = OTHER; note = 2'-O-methyl-uridine-3'-phosphate
tgttagtatattagtgatatt

SEQ ID NO: 1966 - RNA, 21 nt, synthetic construct
  source 1..21: mol_type = other RNA
  modified_base 1: mod_base = OTHER; note = 2'-O-methyl-uridine-3'-phosphorothioate
  modified_base 2: mod_base = OTHER; note = 2'-deoxy-2'-fluoro-guanosine-3'-phosphorothioate
  modified_base 3: mod_base = OTHER; note = 2'-O-methyl-guanosine-3'-phosphate
  modified_base 4: mod_base = OTHER; note = 2'-O-methyl-uridine-3'-phosphate
  modified_base 5: mod_base = OTHER; note = 2'-O-methyl-uridine-3'-phosphate
  modified_base 6: mod_base = OTHER; note = 2'-deoxy-2'-fluoro-adenosine-3'-phosphate
  modified_base 7: mod_base = OTHER; note = 2'-O-methyl-adenosine-3'-phosphate
  modified_base 8: mod_base = OTHER; note = 2'-deoxy-2'-fluoro-uridine-3'-phosphate
  modified_base 9: mod_base = OTHER; note = 2'-deoxy-2'-fluoro-uridine-3'-phosphate
  modified_base 10: mod_base = OTHER; note = 2'-O-methyl-adenosine-3'-phosphate
  modified_base 11: mod_base = OTHER; note = 2'-O-methyl-cytidine-3'-phosphate
  modified_base 12: mod_base = OTHER; note = 2'-O-methyl-adenosine-3'-phosphate
  modified_base 13: mod_base = OTHER; note = 2'-O-methyl-cytidine-3'-phosphate
  modified_base 14: mod_base = OTHER; note = 2'-deoxy-2'-fluoro-adenosine-3'-phosphate
  modified_base 15: mod_base = OTHER; note = 2'-O-methyl-uridine-3'-phosphate
  modified_base 16: mod_base = OTHER; note = 2'-deoxy-2'-fluoro-cytidine-3'-phosphate
  modified_base 17: mod_base = OTHER; note = 2'-O-methyl-cytidine-3'-phosphate
  modified_base 18: mod_base = OTHER; note = 2'-O-methyl-uridine-3'-phosphate
  modified_base 19: mod_base = OTHER; note = 2'-O-methyl-cytidine-3'-phosphorothioate
  modified_base 20: mod_base = OTHER; note = 2'-O-methyl-uridine-3'-phosphorothioate
  modified_base 21: mod_base = OTHER; note = 2'-O-methyl-uridine-3'-phosphate
tggttaattacacatcctctt

SEQ ID NO: 1967 - RNA, 21 nt, synthetic construct
  source 1..21: mol_type = other RNA
  modified_base 1: mod_base = OTHER; note = 2'-O-methyl-adenosine-3'-phosphorothioate
  modified_base 2: mod_base = OTHER; note = 2'-deoxy-2'-fluoro-adenosine-3'-phosphorothioate
  modified_base 3: mod_base = OTHER; note = 2'-O-methyl-uridine-3'-phosphate
  modified_base 4: mod_base = OTHER; note = 2'-O-methyl-uridine-3'-phosphate
  modified_base 5: mod_base = OTHER; note = 2'-O-methyl-uridine-3'-phosphate
  modified_base 6: mod_base = OTHER; note = 2'-deoxy-2'-fluoro-guanosine-3'-phosphate
  modified_base 7: mod_base = OTHER; note = 2'-O-methyl-adenosine-3'-phosphate
  modified_base 8: mod_base = OTHER; note = 2'-deoxy-2'-fluoro-guanosine-3'-phosphate
  modified_base 9: mod_base = OTHER; note = 2'-deoxy-2'-fluoro-uridine-3'-phosphate
  modified_base 10: mod_base = OTHER; note = 2'-O-methyl-uridine-3'-phosphate
  modified_base 11: mod_base = OTHER; note = 2'-O-methyl-adenosine-3'-phosphate
  modified_base 12: mod_base = OTHER; note = 2'-O-methyl-uridine-3'-phosphate
  modified_base 13: mod_base = OTHER; note = 2'-O-methyl-adenosine-3'-phosphate
  modified_base 14: mod_base = OTHER; note = 2'-deoxy-2'-fluoro-guanosine-3'-phosphate
  modified_base 15: mod_base = OTHER; note = 2'-O-methyl-uridine-3'-phosphate
  modified_base 16: mod_base = OTHER; note = 2'-deoxy-2'-fluoro-adenosine-3'-phosphate
  modified_base 17: mod_base = OTHER; note = 2'-O-methyl-uridine-3'-phosphate
  modified_base 18: mod_base = OTHER; note = 2'-O-methyl-uridine-3'-phosphate
  modified_base 19: mod_base = OTHER; note = 2'-O-methyl-cytidine-3'-phosphorothioate
  modified_base 20: mod_base = OTHER; note = 2'-O-methyl-uridine-3'-phosphorothioate
  modified_base 21: mod_base = OTHER; note = 2'-O-methyl-uridine-3'-phosphate
aatttgagttatagtattctt

SEQ ID NO: 1968 - RNA, 21 nt, synthetic construct
  source 1..21: mol_type = other RNA
  modified_base 1: mod_base = OTHER; note = 2'-O-methyl-guanosine-3'-phosphorothioate
  modified_base 2: mod_base = OTHER; note = 2'-deoxy-2'-fluoro-adenosine-3'-phosphorothioate
  modified_base 3: mod_base = OTHER; note = 2'-O-methyl-uridine-3'-phosphate
  modified_base 4: mod_base = OTHER; note = 2'-O-methyl-cytidine-3'-phosphate
  modified_base 5: mod_base = OTHER; note = 2'-O-methyl-uridine-3'-phosphate
  modified_base 6: mod_base = OTHER; note = 2'-deoxy-2'-fluoro-adenosine-3'-phosphate
  modified_base 7: mod_base = OTHER; note = 2'-O-methyl-guanosine-3'-phosphate
  modified_base 8: mod_base = OTHER; note = 2'-deoxy-2'-fluoro-adenosine-3'-phosphate
  modified_base 9: mod_base = OTHER; note = 2'-deoxy-2'-fluoro-guanosine-3'-phosphate
  modified_base 10: mod_base = OTHER; note = 2'-O-methyl-guanosine-3'-phosphate
  modified_base 11: mod_base = OTHER; note = 2'-O-methyl-uridine-3'-phosphate
  modified_base 12: mod_base = OTHER; note = 2'-O-methyl-uridine-3'-phosphate
  modified_base 13: mod_base = OTHER; note = 2'-O-methyl-guanosine-3'-phosphate
  modified_base 14: mod_base = OTHER; note = 2'-deoxy-2'-fluoro-uridine-3'-phosphate
  modified_base 15: mod_base = OTHER; note = 2'-O-methyl-adenosine-3'-phosphate
  modified_base 16: mod_base = OTHER; note = 2'-deoxy-2'-fluoro-guanosine-3'-phosphate
  modified_base 17: mod_base = OTHER; note = 2'-O-methyl-cytidine-3'-phosphate
  modified_base 18: mod_base = OTHER; note = 2'-O-methyl-adenosine-3'-phosphate
  modified_base 19: mod_base = OTHER; note = 2'-O-methyl-guanosine-3'-phosphorothioate
  modified_base 20: mod_base = OTHER; note = 2'-O-methyl-uridine-3'-phosphorothioate
  modified_base 21: mod_base = OTHER; note = 2'-O-methyl-uridine-3'-phosphate
gatctagaggttgtagcagtt

SEQ ID NO: 1969 - RNA, 21 nt, synthetic construct
  source 1..21: mol_type = other RNA
  modified_base 1: mod_base = OTHER; note = 2'-O-methyl-guanosine-3'-phosphorothioate
  modified_base 2: mod_base = OTHER; note = 2'-deoxy-2'-fluoro-adenosine-3'-phosphorothioate
  modified_base 3: mod_base = OTHER; note = 2'-O-methyl-cytidine-3'-phosphate
  modified_base 4: mod_base = OTHER; note = 2'-O-methyl-adenosine-3'-phosphate
  modified_base 5: mod_base = OTHER; note = 2'-O-methyl-guanosine-3'-phosphate
  modified_base 6: mod_base = OTHER; note = 2'-deoxy-2'-fluoro-adenosine-3'-phosphate
  modified_base 7: mod_base = OTHER; note = 2'-O-methyl-adenosine-3'-phosphate
  modified_base 8: mod_base = OTHER; note = 2'-deoxy-2'-fluoro-adenosine-3'-phosphate
  modified_base 9: mod_base = OTHER; note = 2'-deoxy-2'-fluoro-uridine-3'-phosphate
  modified_base 10: mod_base = OTHER; note = 2'-O-methyl-uridine-3'-phosphate
  modified_base 11: mod_base = OTHER; note = 2'-O-methyl-guanosine-3'-phosphate
  modified_base 12: mod_base = OTHER; note = 2'-O-methyl-adenosine-3'-phosphate
  modified_base 13: mod_base = OTHER; note = 2'-O-methyl-uridine-3'-phosphate
  modified_base 14: mod_base = OTHER; note = 2'-deoxy-2'-fluoro-adenosine-3'-phosphate
  modified_base 15: mod_base = OTHER; note = 2'-O-methyl-adenosine-3'-phosphate
  modified_base 16: mod_base = OTHER; note = 2'-deoxy-2'-fluoro-adenosine-3'-phosphate
  modified_base 17: mod_base = OTHER; note = 2'-O-methyl-uridine-3'-phosphate
  modified_base 18: mod_base = OTHER; note = 2'-O-methyl-adenosine-3'-phosphate
  modified_base 19: mod_base = OTHER; note = 2'-O-methyl-guanosine-3'-phosphorothioate
  modified_base 20: mod_base = OTHER; note = 2'-O-methyl-uridine-3'-phosphorothioate
  modified_base 21: mod_base = OTHER; note = 2'-O-methyl-uridine-3'-phosphate
gacagaaattgataaatagtt

SEQ ID NO: 1970 - RNA, 21 nt, synthetic construct
  source 1..21: mol_type = other RNA
  modified_base 1: mod_base = OTHER; note = 2'-O-methyl-adenosine-3'-phosphorothioate
  modified_base 2: mod_base = OTHER; note = 2'-deoxy-2'-fluoro-uridine-3'-phosphorothioate
  modified_base 3: mod_base = OTHER; note = 2'-O-methyl-adenosine-3'-phosphate
  modified_base 4: mod_base = OTHER; note = 2'-O-methyl-uridine-3'-phosphate
  modified_base 5: mod_base = OTHER; note = 2'-O-methyl-uridine-3'-phosphate
  modified_base 6: mod_base = OTHER; note = 2'-deoxy-2'-fluoro-adenosine-3'-phosphate
  modified_base 7: mod_base = OTHER; note = 2'-O-methyl-guanosine-3'-phosphate
  modified_base 8: mod_base = OTHER; note = 2'-deoxy-2'-fluoro-uridine-3'-phosphate
  modified_base 9: mod_base = OTHER; note = 2'-deoxy-2'-fluoro-adenosine-3'-phosphate
  modified_base 10: mod_base = OTHER; note = 2'-O-methyl-adenosine-3'-phosphate
  modified_base 11: mod_base = OTHER; note = 2'-O-methyl-cytidine-3'-phosphate
  modified_base 12: mod_base = OTHER; note = 2'-O-methyl-adenosine-3'-phosphate
  modified_base 13: mod_base = OTHER; note = 2'-O-methyl-uridine-3'-phosphate
  modified_base 14: mod_base = OTHER; note = 2'-deoxy-2'-fluoro-guanosine-3'-phosphate
  modified_base 15: mod_base = OTHER; note = 2'-O-methyl-uridine-3'-phosphate
  modified_base 16: mod_base = OTHER; note = 2'-deoxy-2'-fluoro-cytidine-3'-phosphate
  modified_base 17: mod_base = OTHER; note = 2'-O-methyl-uridine-3'-phosphate
  modified_base 18: mod_base = OTHER; note = 2'-O-methyl-uridine-3'-phosphate
  modified_base 19: mod_base = OTHER; note = 2'-O-methyl-cytidine-3'-phosphorothioate
  modified_base 20: mod_base = OTHER; note = 2'-O-methyl-uridine-3'-phosphorothioate
  modified_base 21: mod_base = OTHER; note = 2'-O-methyl-uridine-3'-phosphate
atattagtaacatgtcttctt

SEQ ID NO: 1971 - RNA, 21 nt, synthetic construct
  source 1..21: mol_type = other RNA
  modified_base 1: mod_base = OTHER; note = 2'-O-methyl-uridine-3'-phosphorothioate
  modified_base 2: mod_base = OTHER; note = 2'-deoxy-2'-fluoro-adenosine-3'-phosphorothioate
  modified_base 3: mod_base = OTHER; note = 2'-O-methyl-guanosine-3'-phosphate
  modified_base 4: mod_base = OTHER; note = 2'-O-methyl-uridine-3'-phosphate
  modified_base 5: mod_base = OTHER; note = 2'-O-methyl-uridine-3'-phosphate
  modified_base 6: mod_base = OTHER; note = 2'-deoxy-2'-fluoro-adenosine-3'-phosphate
  modified_base 7: mod_base = OTHER; note = 2'-O-methyl-adenosine-3'-phosphate
  modified_base 8: mod_base = OTHER; note = 2'-deoxy-2'-fluoro-uridine-3'-phosphate
  modified_base 9: mod_base = OTHER; note = 2'-deoxy-2'-fluoro-adenosine-3'-phosphate
  modified_base 10: mod_base = OTHER; note = 2'-O-methyl-uridine-3'-phosphate
  modified_base 11: mod_base = OTHER; note = 2'-O-methyl-uridine-3'-phosphate
  modified_base 12: mod_base = OTHER; note = 2'-O-methyl-uridine-3'-phosphate
  modified_base 13: mod_base = OTHER; note = 2'-O-methyl-guanosine-3'-phosphate
  modified_base 14: mod_base = OTHER; note = 2'-deoxy-2'-fluoro-guanosine-3'-phosphate
  modified_base 15: mod_base = OTHER; note = 2'-O-methyl-adenosine-3'-phosphate
  modified_base 16: mod_base = OTHER; note = 2'-deoxy-2'-fluoro-guanosine-3'-phosphate
  modified_base 17: mod_base = OTHER; note = 2'-O-methyl-adenosine-3'-phosphate
  modified_base 18: mod_base = OTHER; note = 2'-O-methyl-guanosine-3'-phosphate
  modified_base 19: mod_base = OTHER; note = 2'-O-methyl-adenosine-3'-phosphorothioate
  modified_base 20: mod_base = OTHER; note = 2'-O-methyl-uridine-3'-phosphorothioate
  modified_base 21: mod_base = OTHER; note = 2'-O-methyl-uridine-3'-phosphate
tagttaatatttggagagatt

SEQ ID NO: 1972 - RNA, 21 nt, synthetic construct
  source 1..21: mol_type = other RNA
  modified_base 1: mod_base = OTHER; note = 2'-O-methyl-adenosine-3'-phosphorothioate
  modified_base 2: mod_base = OTHER; note = 2'-deoxy-2'-fluoro-guanosine-3'-phosphorothioate
  modified_base 3: mod_base = OTHER; note = 2'-O-methyl-adenosine-3'-phosphate
  modified_base 4: mod_base = OTHER; note = 2'-O-methyl-uridine-3'-phosphate
  modified_base 5: mod_base = OTHER; note = 2'-O-methyl-cytidine-3'-phosphate
  modified_base 6: mod_base = OTHER; note = 2'-deoxy-2'-fluoro-uridine-3'-phosphate
  modified_base 7: mod_base = OTHER; note = 2'-O-methyl-adenosine-3'-phosphate
  modified_base 8: mod_base = OTHER; note = 2'-deoxy-2'-fluoro-guanosine-3'-phosphate
  modified_base 9: mod_base = OTHER; note = 2'-deoxy-2'-fluoro-adenosine-3'-phosphate
  modified_base 10: mod_base = OTHER; note = 2'-O-methyl-guanosine-3'-phosphate
  modified_base 11: mod_base = OTHER; note = 2'-O-methyl-guanosine-3'-phosphate
  modified_base 12: mod_base = OTHER; note = 2'-O-methyl-uridine-3'-phosphate
  modified_base 13: mod_base = OTHER; note = 2'-O-methyl-uridine-3'-phosphate
  modified_base 14: mod_base = OTHER; note = 2'-deoxy-2'-fluoro-guanosine-3'-phosphate
  modified_base 15: mod_base = OTHER; note = 2'-O-methyl-uridine-3'-phosphate
  modified_base 16: mod_base = OTHER; note = 2'-deoxy-2'-fluoro-adenosine-3'-phosphate
  modified_base 17: mod_base = OTHER; note = 2'-O-methyl-guanosine-3'-phosphate
  modified_base 18: mod_base = OTHER; note = 2'-O-methyl-cytidine-3'-phosphate
  modified_base 19: mod_base = OTHER; note = 2'-O-methyl-adenosine-3'-phosphorothioate
  modified_base 20: mod_base = OTHER; note = 2'-O-methyl-uridine-3'-phosphorothioate
  modified_base 21: mod_base = OTHER; note = 2'-O-methyl-uridine-3'-phosphate
agatctagaggttgtagcatt

SEQ ID NO: 1973 - RNA, 21 nt, synthetic construct
  source 1..21: mol_type = other RNA
  modified_base 1: mod_base = OTHER; note = 2'-O-methyl-guanosine-3'-phosphorothioate
  modified_base 2: mod_base = OTHER; note = 2'-deoxy-2'-fluoro-uridine-3'-phosphorothioate
  modified_base 3: mod_base = OTHER; note = 2'-O-methyl-adenosine-3'-phosphate
  modified_base 4: mod_base = OTHER; note = 2'-O-methyl-uridine-3'-phosphate
  modified_base 5: mod_base = OTHER; note = 2'-O-methyl-uridine-3'-phosphate
  modified_base 6: mod_base = OTHER; note = 2'-deoxy-2'-fluoro-guanosine-3'-phosphate
  modified_base 7: mod_base = OTHER; note = 2'-O-methyl-guanosine-3'-phosphate
  modified_base 8: mod_base = OTHER; note = 2'-deoxy-2'-fluoro-adenosine-3'-phosphate
  modified_base 9: mod_base = OTHER; note = 2'-deoxy-2'-fluoro-cytidine-3'-phosphate
  modified_base 10: mod_base = OTHER; note = 2'-O-methyl-uridine-3'-phosphate
  modified_base 11: mod_base = OTHER; note = 2'-O-methyl-uridine-3'-phosphate
  modified_base 12: mod_base = OTHER; note = 2'-O-methyl-uridine-3'-phosphate
  modified_base 13: mod_base = OTHER; note = 2'-O-methyl-cytidine-3'-phosphate
  modified_base 14: mod_base = OTHER; note = 2'-deoxy-2'-fluoro-uridine-3'-phosphate
  modified_base 15: mod_base = OTHER; note = 2'-O-methyl-cytidine-3'-phosphate
  modified_base 16: mod_base = OTHER; note = 2'-deoxy-2'-fluoro-cytidine-3'-phosphate
  modified_base 17: mod_base = OTHER; note = 2'-O-methyl-adenosine-3'-phosphate
  modified_base 18: mod_base = OTHER; note = 2'-O-methyl-uridine-3'-phosphate
  modified_base 19: mod_base = OTHER; note = 2'-O-methyl-guanosine-3'-phosphorothioate
  modified_base 20: mod_base = OTHER; note = 2'-O-methyl-uridine-3'-phosphorothioate
  modified_base 21: mod_base = OTHER; note = 2'-O-methyl-uridine-3'-phosphate
gtattggactttctccatgtt

SEQ ID NO: 1974 - RNA, 21 nt, synthetic construct
  source 1..21: mol_type = other RNA
  modified_base 1: mod_base = OTHER; note = 2'-O-methyl-guanosine-3'-phosphorothioate
  modified_base 2: mod_base = OTHER; note = 2'-deoxy-2'-fluoro-adenosine-3'-phosphorothioate
  modified_base 3: mod_base = OTHER; note = 2'-O-methyl-adenosine-3'-phosphate
  modified_base 4: mod_base = OTHER; note = 2'-O-methyl-uridine-3'-phosphate
  modified_base 5: mod_base = OTHER; note = 2'-O-methyl-guanosine-3'-phosphate
  modified_base 6: mod_base = OTHER; note = 2'-deoxy-2'-fluoro-uridine-3'-phosphate
  modified_base 7: mod_base = OTHER; note = 2'-O-methyl-adenosine-3'-phosphate
  modified_base 8: mod_base = OTHER; note = 2'-deoxy-2'-fluoro-guanosine-3'-phosphate
  modified_base 9: mod_base = OTHER; note = 2'-deoxy-2'-fluoro-adenosine-3'-phosphate
  modified_base 10: mod_base = OTHER; note = 2'-O-methyl-uridine-3'-phosphate
  modified_base 11: mod_base = OTHER; note = 2'-O-methyl-uridine-3'-phosphate
  modified_base 12: mod_base = OTHER; note = 2'-O-methyl-cytidine-3'-phosphate
  modified_base 13: mod_base = OTHER; note = 2'-O-methyl-uridine-3'-phosphate
  modified_base 14: mod_base = OTHER; note = 2'-deoxy-2'-fluoro-guanosine-3'-phosphate
  modified_base 15: mod_base = OTHER; note = 2'-O-methyl-adenosine-3'-phosphate
  modified_base 16: mod_base = OTHER; note = 2'-deoxy-2'-fluoro-uridine-3'-phosphate
  modified_base 17: mod_base = OTHER; note = 2'-O-methyl-adenosine-3'-phosphate
  modified_base 18: mod_base = OTHER; note = 2'-O-methyl-guanosine-3'-phosphate
  modified_base 19: mod_base = OTHER; note = 2'-O-methyl-uridine-3'-phosphorothioate
  modified_base 20: mod_base = OTHER; note = 2'-O-methyl-uridine-3'-phosphorothioate
  modified_base 21: mod_base = OTHER; note = 2'-O-methyl-uridine-3'-phosphate
gaatgtagattctgatagttt

SEQ ID NO: 1975 - RNA, 21 nt, synthetic construct
  source 1..21: mol_type = other RNA
  modified_base 1: mod_base = OTHER; note = 2'-O-methyl-uridine-3'-phosphorothioate
  modified_base 2: mod_base = OTHER; note = 2'-deoxy-2'-fluoro-adenosine-3'-phosphorothioate
  modified_base 3: mod_base = OTHER; note = 2'-O-methyl-uridine-3'-phosphate
  modified_base 4: mod_base = OTHER; note = 2'-O-methyl-uridine-3'-phosphate
  modified_base 5: mod_base = OTHER; note = 2'-O-methyl-guanosine-3'-phosphate
  modified_base 6: mod_base = OTHER; note = 2'-deoxy-2'-fluoro-guanosine-3'-phosphate
  modified_base 7: mod_base = OTHER; note = 2'-O-methyl-adenosine-3'-phosphate
  modified_base 8: mod_base = OTHER; note = 2'-deoxy-2'-fluoro-cytidine-3'-phosphate
  modified_base 9: mod_base = OTHER; note = 2'-deoxy-2'-fluoro-uridine-3'-phosphate
  modified_base 10: mod_base = OTHER; note = 2'-O-methyl-uridine-3'-phosphate
  modified_base 11: mod_base = OTHER; note = 2'-O-methyl-uridine-3'-phosphate
  modified_base 12: mod_base = OTHER; note = 2'-O-methyl-cytidine-3'-phosphate
  modified_base 13: mod_base = OTHER; note = 2'-O-methyl-uridine-3'-phosphate
  modified_base 14: mod_base = OTHER; note = 2'-deoxy-2'-fluoro-cytidine-3'-phosphate
  modified_base 15: mod_base = OTHER; note = 2'-O-methyl-cytidine-3'-phosphate
  modified_base 16: mod_base = OTHER; note = 2'-deoxy-2'-fluoro-adenosine-3'-phosphate
  modified_base 17: mod_base = OTHER; note = 2'-O-methyl-uridine-3'-phosphate
  modified_base 18: mod_base = OTHER; note = 2'-O-methyl-guanosine-3'-phosphate
  modified_base 19: mod_base = OTHER; note = 2'-O-methyl-adenosine-3'-phosphorothioate
  modified_base 20: mod_base = OTHER; note = 2'-O-methyl-uridine-3'-phosphorothioate
  modified_base 21: mod_base = OTHER; note = 2'-O-methyl-uridine-3'-phosphate
tattggactttctccatgatt

SEQ ID NO: 1976 - RNA, 21 nt, synthetic construct
  source 1..21: mol_type = other RNA
  modified_base 1: mod_base = OTHER; note = 2'-O-methyl-uridine-3'-phosphorothioate
  modified_base 2: mod_base = OTHER; note = 2'-deoxy-2'-fluoro-guanosine-3'-phosphorothioate
  modified_base 3: mod_base = OTHER; note = 2'-O-methyl-cytidine-3'-phosphate
  modified_base 4: mod_base = OTHER; note = 2'-O-methyl-uridine-3'-phosphate
  modified_base 5: mod_base = OTHER; note = 2'-O-methyl-guanosine-3'-phosphate
  modified_base 6: mod_base = OTHER; note = 2'-deoxy-2'-fluoro-adenosine-3'-phosphate
  modified_base 7: mod_base = OTHER; note = 2'-O-methyl-guanosine-3'-phosphate
  modified_base 8: mod_base = OTHER; note = 2'-deoxy-2'-fluoro-cytidine-3'-phosphate
  modified_base 9: mod_base = OTHER; note = 2'-deoxy-2'-fluoro-guanosine-3'-phosphate
  modified_base 10: mod_base = OTHER; note = 2'-O-methyl-adenosine-3'-phosphate
  modified_base 11: mod_base = OTHER; note = 2'-O-methyl-guanosine-3'-phosphate
  modified_base 12: mod_base = OTHER; note = 2'-O-methyl-uridine-3'-phosphate
  modified_base 13: mod_base = OTHER; note = 2'-O-methyl-guanosine-3'-phosphate
  modified_base 14: mod_base = OTHER; note = 2'-deoxy-2'-fluoro-adenosine-3'-phosphate
  modified_base 15: mod_base = OTHER; note = 2'-O-methyl-guanosine-3'-phosphate
  modified_base 16: mod_base = OTHER; note = 2'-deoxy-2'-fluoro-guanosine-3'-phosphate
  modified_base 17: mod_base = OTHER; note = 2'-O-methyl-uridine-3'-phosphate
  modified_base 18: mod_base = OTHER; note = 2'-O-methyl-adenosine-3'-phosphate
  modified_base 19: mod_base = OTHER; note = 2'-O-methyl-uridine-3'-phosphorothioate
  modified_base 20: mod_base = OTHER; note = 2'-O-methyl-uridine-3'-phosphorothioate
  modified_base 21: mod_base = OTHER; note = 2'-O-methyl-uridine-3'-phosphate
tgctgagcgagtgaggtattt

SEQ ID NO: 1977 - RNA, 21 nt, synthetic construct
  source 1..21: mol_type = other RNA
  modified_base 1: mod_base = OTHER; note = 2'-O-methyl-uridine-3'-phosphorothioate
  modified_base 2: mod_base = OTHER; note = 2'-deoxy-2'-fluoro-adenosine-3'-phosphorothioate
  modified_base 3: mod_base = OTHER; note = 2'-O-methyl-guanosine-3'-phosphate
  modified_base 4: mod_base = OTHER; note = 2'-O-methyl-cytidine-3'-phosphate
  modified_base 5: mod_base = OTHER; note = 2'-O-methyl-uridine-3'-phosphate
  modified_base 6: mod_base = OTHER; note = 2'-deoxy-2'-fluoro-guanosine-3'-phosphate
  modified_base 7: mod_base = OTHER; note = 2'-O-methyl-adenosine-3'-phosphate
  modified_base 8: mod_base = OTHER; note = 2'-deoxy-2'-fluoro-guanosine-3'-phosphate
  modified_base 9: mod_base = OTHER; note = 2'-deoxy-2'-fluoro-cytidine-3'-phosphate
  modified_base 10: mod_base = OTHER; note = 2'-O-methyl-guanosine-3'-phosphate
  modified_base 11: mod_base = OTHER; note = 2'-O-methyl-adenosine-3'-phosphate
  modified_base 12: mod_base = OTHER; note = 2'-O-methyl-guanosine-3'-phosphate
  modified_base 13: mod_base = OTHER; note = 2'-O-methyl-uridine-3'-phosphate
  modified_base 14: mod_base = OTHER; note = 2'-deoxy-2'-fluoro-guanosine-3'-phosphate
  modified_base 15: mod_base = OTHER; note = 2'-O-methyl-adenosine-3'-phosphate
  modified_base 16: mod_base = OTHER; note = 2'-deoxy-2'-fluoro-guanosine-3'-phosphate
  modified_base 17: mod_base = OTHER; note = 2'-O-methyl-guanosine-3'-phosphate
  modified_base 18: mod_base = OTHER; note = 2'-O-methyl-uridine-3'-phosphate
  modified_base 19: mod_base = OTHER; note = 2'-O-methyl-adenosine-3'-phosphorothioate
  modified_base 20: mod_base = OTHER; note = 2'-O-methyl-uridine-3'-phosphorothioate
  modified_base 21: mod_base = OTHER; note = 2'-O-methyl-uridine-3'-phosphate
tagctgagcgagtgaggtatt

SEQ ID NO: 1978 - RNA, 21 nt, synthetic construct
  source 1..21: mol_type = other RNA
  modified_base 1: mod_base = OTHER; note = 2'-O-methyl-uridine-3'-phosphorothioate
  modified_base 2: mod_base = OTHER; note = 2'-deoxy-2'-fluoro-uridine-3'-phosphorothioate
  modified_base 3: mod_base = OTHER; note = 2'-O-methyl-adenosine-3'-phosphate
  modified_base 4: mod_base = OTHER; note = 2'-O-methyl-guanosine-3'-phosphate
  modified_base 5: mod_base = OTHER; note = 2'-O-methyl-cytidine-3'-phosphate
  modified_base 6: mod_base = OTHER; note = 2'-deoxy-2'-fluoro-uridine-3'-phosphate
  modified_base 7: mod_base = OTHER; note = 2'-O-methyl-guanosine-3'-phosphate
  modified_base 8: mod_base = OTHER; note = 2'-deoxy-2'-fluoro-adenosine-3'-phosphate
  modified_base 9: mod_base = OTHER; note = 2'-deoxy-2'-fluoro-guanosine-3'-phosphate
  modified_base 10: mod_base = OTHER; note = 2'-O-methyl-cytidine-3'-phosphate
  modified_base 11: mod_base = OTHER; note = 2'-O-methyl-guanosine-3'-phosphate
  modified_base 12: mod_base = OTHER; note = 2'-O-methyl-adenosine-3'-phosphate
  modified_base 13: mod_base = OTHER; note = 2'-O-methyl-guanosine-3'-phosphate
  modified_base 14: mod_base = OTHER; note = 2'-deoxy-2'-fluoro-uridine-3'-phosphate
  modified_base 15: mod_base = OTHER; note = 2'-O-methyl-guanosine-3'-phosphate
  modified_base 16: mod_base = OTHER; note = 2'-deoxy-2'-fluoro-adenosine-3'-phosphate
  modified_base 17: mod_base = OTHER; note = 2'-O-methyl-guanosine-3'-phosphate
  modified_base 18: mod_base = OTHER; note = 2'-O-methyl-guanosine-3'-phosphate
  modified_base 19: mod_base = OTHER; note = 2'-O-methyl-uridine-3'-phosphorothioate
  modified_base 20: mod_base = OTHER; note = 2'-O-methyl-uridine-3'-phosphorothioate
  modified_base 21: mod_base = OTHER; note = 2'-O-methyl-uridine-3'-phosphate
ttagctgagcgagtgaggttt

SEQ ID NO: 1979 - RNA, 21 nt, synthetic construct
  source 1..21: mol_type = other RNA
  modified_base 1: mod_base = OTHER; note = 2'-O-methyl-uridine-3'-phosphorothioate
  modified_base 2: mod_base = OTHER; note = 2'-deoxy-2'-fluoro-guanosine-3'-phosphorothioate
  modified_base 3: mod_base = OTHER; note = 2'-O-methyl-cytidine-3'-phosphate
  modified_base 4: mod_base = OTHER; note = 2'-O-methyl-uridine-3'-phosphate
  modified_base 5: mod_base = OTHER; note = 2'-O-methyl-uridine-3'-phosphate
  modified_base 6: mod_base = OTHER; note = 2'-deoxy-2'-fluoro-guanosine-3'-phosphate
  modified_base 7: mod_base = OTHER; note = 2'-O-methyl-uridine-3'-phosphate
  modified_base 8: mod_base = OTHER; note = 2'-deoxy-2'-fluoro-uridine-3'-phosphate
  modified_base 9: mod_base = OTHER; note = 2'-deoxy-2'-fluoro-guanosine-3'-phosphate
  modified_base 10: mod_base = OTHER; note = 2'-O-methyl-adenosine-3'-phosphate
  modified_base 11: mod_base = OTHER; note = 2'-O-methyl-guanosine-3'-phosphate
  modified_base 12: mod_base = OTHER; note = 2'-O-methyl-guanosine-3'-phosphate
  modified_base 13: mod_base = OTHER; note = 2'-O-methyl-cytidine-3'-phosphate
  modified_base 14: mod_base = OTHER; note = 2'-deoxy-2'-fluoro-adenosine-3'-phosphate
  modified_base 15: mod_base = OTHER; note = 2'-O-methyl-uridine-3'-phosphate
  modified_base 16: mod_base = OTHER; note = 2'-deoxy-2'-fluoro-uridine-3'-phosphate
  modified_base 17: mod_base = OTHER; note = 2'-O-methyl-uridine-3'-phosphate
  modified_base 18: mod_base = OTHER; note = 2'-O-methyl-cytidine-3'-phosphate
  modified_base 19: mod_base = OTHER; note = 2'-O-methyl-adenosine-3'-phosphorothioate
  modified_base 20: mod_base = OTHER; note = 2'-O-methyl-uridine-3'-phosphorothioate
  modified_base 21: mod_base = OTHER; note = 2'-O-methyl-uridine-3'-phosphate
tgcttgttgaggcatttcatt

SEQ ID NO: 1980 - RNA, 21 nt, synthetic construct
  source 1..21: mol_type = other RNA
  modified_base 1: mod_base = OTHER; note = 2'-O-methyl-uridine-3'-phosphorothioate
  modified_base 2: mod_base = OTHER; note = 2'-deoxy-2'-fluoro-uridine-3'-phosphorothioate
  modified_base 3: mod_base = OTHER; note = 2'-O-methyl-guanosine-3'-phosphate
  modified_base 4: mod_base = OTHER; note = 2'-O-methyl-cytidine-3'-phosphate
  modified_base 5: mod_base = OTHER; note = 2'-O-methyl-uridine-3'-phosphate
  modified_base 6: mod_base = OTHER; note = 2'-deoxy-2'-fluoro-uridine-3'-phosphate
  modified_base 7: mod_base = OTHER; note = 2'-O-methyl-guanosine-3'-phosphate
  modified_base 8: mod_base = OTHER; note = 2'-deoxy-2'-fluoro-uridine-3'-phosphate
  modified_base 9: mod_base = OTHER; note = 2'-deoxy-2'-fluoro-uridine-3'-phosphate
  modified_base 10: mod_base = OTHER; note = 2'-O-methyl-guanosine-3'-phosphate
  modified_base 11: mod_base = OTHER; note = 2'-O-methyl-adenosine-3'-phosphate
  modified_base 12: mod_base = OTHER; note = 2'-O-methyl-guanosine-3'-phosphate
  modified_base 13: mod_base = OTHER; note = 2'-O-methyl-guanosine-3'-phosphate
  modified_base 14: mod_base = OTHER; note = 2'-deoxy-2'-fluoro-cytidine-3'-phosphate
  modified_base 15: mod_base = OTHER; note = 2'-O-methyl-adenosine-3'-phosphate
  modified_base 16: mod_base = OTHER; note = 2'-deoxy-2'-fluoro-uridine-3'-phosphate
  modified_base 17: mod_base = OTHER; note = 2'-O-methyl-uridine-3'-phosphate
  modified_base 18: mod_base = OTHER; note = 2'-O-methyl-uridine-3'-phosphate
  modified_base 19: mod_base = OTHER; note = 2'-O-methyl-cytidine-3'-phosphorothioate
  modified_base 20: mod_base = OTHER; note = 2'-O-methyl-uridine-3'-phosphorothioate
  modified_base 21: mod_base = OTHER; note = 2'-O-methyl-uridine-3'-phosphate
ttgcttgttgaggcatttctt

SEQ ID NO: 1981 - RNA, 21 nt, synthetic construct
  source 1..21: mol_type = other RNA
  modified_base 1: mod_base = OTHER; note = 2'-O-methyl-uridine-3'-phosphorothioate
  modified_base 2: mod_base = OTHER; note = 2'-deoxy-2'-fluoro-guanosine-3'-phosphorothioate
  modified_base 3: mod_base = OTHER; note = 2'-O-methyl-uridine-3'-phosphate
  modified_base 4: mod_base = OTHER; note = 2'-O-methyl-guanosine-3'-phosphate
  modified_base 5: mod_base = OTHER; note = 2'-O-methyl-cytidine-3'-phosphate
  modified_base 6: mod_base = OTHER; note = 2'-deoxy-2'-fluoro-uridine-3'-phosphate
  modified_base 7: mod_base = OTHER; note = 2'-O-methyl-uridine-3'-phosphate
  modified_base 8: mod_base = OTHER; note = 2'-deoxy-2'-fluoro-guanosine-3'-phosphate
  modified_base 9: mod_base = OTHER; note = 2'-deoxy-2'-fluoro-uridine-3'-phosphate
  modified_base 10: mod_base = OTHER; note = 2'-O-methyl-uridine-3'-phosphate
  modified_base 11: mod_base = OTHER; note = 2'-O-methyl-guanosine-3'-phosphate
  modified_base 12: mod_base = OTHER; note = 2'-O-methyl-adenosine-3'-phosphate
  modified_base 13: mod_base = OTHER; note = 2'-O-methyl-guanosine-3'-phosphate
  modified_base 14: mod_base = OTHER; note = 2'-deoxy-2'-fluoro-guanosine-3'-phosphate
  modified_base 15: mod_base = OTHER; note = 2'-O-methyl-cytidine-3'-phosphate
  modified_base 16: mod_base = OTHER; note = 2'-deoxy-2'-fluoro-adenosine-3'-phosphate
  modified_base 17: mod_base = OTHER; note = 2'-O-methyl-uridine-3'-phosphate
  modified_base 18: mod_base = OTHER; note = 2'-O-methyl-uridine-3'-phosphate
  modified_base 19: mod_base = OTHER; note = 2'-O-methyl-uridine-3'-phosphorothioate
  modified_base 20: mod_base = OTHER; note = 2'-O-methyl-uridine-3'-phosphorothioate
  modified_base 21: mod_base = OTHER; note = 2'-O-methyl-uridine-3'-phosphate
tgtgcttgttgaggcattttt

SEQ ID NO: 1982 - RNA, 21 nt, synthetic construct
  source 1..21: mol_type = other RNA
  modified_base 1: mod_base = OTHER; note = 2'-O-methyl-uridine-3'-phosphorothioate
  modified_base 2: mod_base = OTHER; note = 2'-deoxy-2'-fluoro-cytidine-3'-phosphorothioate
  modified_base 3: mod_base = OTHER; note = 2'-O-methyl-guanosine-3'-phosphate
  modified_base 4: mod_base = OTHER; note = 2'-O-methyl-uridine-3'-phosphate
  modified_base 5: mod_base = OTHER; note = 2'-O-methyl-guanosine-3'-phosphate
  modified_base 6: mod_base = OTHER; note = 2'-deoxy-2'-fluoro-cytidine-3'-phosphate
  modified_base 7: mod_base = OTHER; note = 2'-O-methyl-uridine-3'-phosphate
  modified_base 8: mod_base = OTHER; note = 2'-deoxy-2'-fluoro-uridine-3'-phosphate
  modified_base 9: mod_base = OTHER; note = 2'-deoxy-2'-fluoro-guanosine-3'-phosphate
  modified_base 10: mod_base = OTHER; note = 2'-O-methyl-uridine-3'-phosphate
  modified_base 11: mod_base = OTHER; note = 2'-O-methyl-uridine-3'-phosphate
  modified_base 12: mod_base = OTHER; note = 2'-O-methyl-guanosine-3'-phosphate
  modified_base 13: mod_base = OTHER; note = 2'-O-methyl-adenosine-3'-phosphate
  modified_base 14: mod_base = OTHER; note = 2'-deoxy-2'-fluoro-guanosine-3'-phosphate
  modified_base 15: mod_base = OTHER; note = 2'-O-methyl-guanosine-3'-phosphate
  modified_base 16: mod_base = OTHER; note = 2'-deoxy-2'-fluoro-cytidine-3'-phosphate
  modified_base 17: mod_base = OTHER; note = 2'-O-methyl-adenosine-3'-phosphate
  modified_base 18: mod_base = OTHER; note = 2'-O-methyl-uridine-3'-phosphate
  modified_base 19: mod_base = OTHER; note = 2'-O-methyl-uridine-3'-phosphorothioate
  modified_base 20: mod_base = OTHER; note = 2'-O-methyl-uridine-3'-phosphorothioate
  modified_base 21: mod_base = OTHER; note = 2'-O-methyl-uridine-3'-phosphate
tcgtgcttgttgaggcatttt

SEQ ID NO: 1983 - RNA, 21 nt, synthetic construct
  source 1..21: mol_type = other RNA
  modified_base 1: mod_base = OTHER; note = 2'-O-methyl-uridine-3'-phosphorothioate
  modified_base 2: mod_base = OTHER; note = 2'-deoxy-2'-fluoro-adenosine-3'-phosphorothioate
  modified_base 3: mod_base = OTHER; note = 2'-O-methyl-cytidine-3'-phosphate
  modified_base 4: mod_base = OTHER; note = 2'-O-methyl-guanosine-3'-phosphate
  modified_base 5: mod_base = OTHER; note = 2'-O-methyl-uridine-3'-phosphate
  modified_base 6: mod_base = OTHER; note = 2'-deoxy-2'-fluoro-guanosine-3'-phosphate
  modified_base 7: mod_base = OTHER; note = 2'-O-methyl-cytidine-3'-phosphate
  modified_base 8: mod_base = OTHER; note = 2'-deoxy-2'-fluoro-uridine-3'-phosphate
  modified_base 9: mod_base = OTHER; note = 2'-deoxy-2'-fluoro-uridine-3'-phosphate
  modified_base 10: mod_base = OTHER; note = 2'-O-methyl-guanosine-3'-phosphate
  modified_base 11: mod_base = OTHER; note = 2'-O-methyl-uridine-3'-phosphate
  modified_base 12: mod_base = OTHER; note = 2'-O-methyl-uridine-3'-phosphate
  modified_base 13: mod_base = OTHER; note = 2'-O-methyl-guanosine-3'-phosphate
  modified_base 14: mod_base = OTHER; note = 2'-deoxy-2'-fluoro-adenosine-3'-phosphate
  modified_base 15: mod_base = OTHER; note = 2'-O-methyl-guanosine-3'-phosphate
  modified_base 16: mod_base = OTHER; note = 2'-deoxy-2'-fluoro-guanosine-3'-phosphate
  modified_base 17: mod_base = OTHER; note = 2'-O-methyl-cytidine-3'-phosphate
  modified_base 18: mod_base = OTHER; note = 2'-O-methyl-adenosine-3'-phosphate
  modified_base 19: mod_base = OTHER; note = 2'-O-methyl-uridine-3'-phosphorothioate
  modified_base 20: mod_base = OTHER; note = 2'-O-methyl-uridine-3'-phosphorothioate
  modified_base 21: mod_base = OTHER; note = 2'-O-methyl-uridine-3'-phosphate
tacgtgcttgttgaggcattt

SEQ ID NO: 1984 - RNA, 21 nt, synthetic construct
  source 1..21: mol_type = other RNA
  modified_base 1: mod_base = OTHER; note = 2'-O-methyl-uridine-3'-phosphorothioate
  modified_base 2: mod_base = OTHER; note = 2'-deoxy-2'-fluoro-guanosine-3'-phosphorothioate
  modified_base 3: mod_base = OTHER; note = 2'-O-methyl-adenosine-3'-phosphate
  modified_base 4: mod_base = OTHER; note = 2'-O-methyl-cytidine-3'-phosphate
  modified_base 5: mod_base = OTHER; note = 2'-O-methyl-guanosine-3'-phosphate
  modified_base 6: mod_base = OTHER; note = 2'-deoxy-2'-fluoro-uridine-3'-phosphate
  modified_base 7: mod_base = OTHER; note = 2'-O-methyl-guanosine-3'-phosphate
  modified_base 8: mod_base = OTHER; note = 2'-deoxy-2'-fluoro-cytidine-3'-phosphate
  modified_base 9: mod_base = OTHER; note = 2'-deoxy-2'-fluoro-uridine-3'-phosphate
  modified_base 10: mod_base = OTHER; note = 2'-O-methyl-uridine-3'-phosphate
  modified_base 11: mod_base = OTHER; note = 2'-O-methyl-guanosine-3'-phosphate
  modified_base 12: mod_base = OTHER; note = 2'-O-methyl-uridine-3'-phosphate
  modified_base 13: mod_base = OTHER; note = 2'-O-methyl-uridine-3'-phosphate
  modified_base 14: mod_base = OTHER; note = 2'-deoxy-2'-fluoro-guanosine-3'-phosphate
  modified_base 15: mod_base = OTHER; note = 2'-O-methyl-adenosine-3'-phosphate
  modified_base 16: mod_base = OTHER; note = 2'-deoxy-2'-fluoro-guanosine-3'-phosphate
  modified_base 17: mod_base = OTHER; note = 2'-O-methyl-guanosine-3'-phosphate
  modified_base 18: mod_base = OTHER; note = 2'-O-methyl-cytidine-3'-phosphate
  modified_base 19: mod_base = OTHER; note = 2'-O-methyl-adenosine-3'-phosphorothioate
  modified_base 20: mod_base = OTHER; note = 2'-O-methyl-uridine-3'-phosphorothioate
  modified_base 21: mod_base = OTHER; note = 2'-O-methyl-uridine-3'-phosphate
tgacgtgcttgttgaggcatt

SEQ ID NO: 1985 - RNA, 21 nt, synthetic construct
  source 1..21: mol_type = other RNA
  modified_base 1: mod_base = OTHER; note = 2'-O-methyl-uridine-3'-phosphorothioate
  modified_base 2: mod_base = OTHER; note = 2'-deoxy-2'-fluoro-uridine-3'-phosphorothioate
  modified_base 3: mod_base = OTHER; note = 2'-O-methyl-uridine-3'-phosphate
  modified_base 4: mod_base = OTHER; note = 2'-O-methyl-guanosine-3'-phosphate
  modified_base 5: mod_base = OTHER; note = 2'-O-methyl-uridine-3'-phosphate
  modified_base 6: mod_base = OTHER; note = 2'-deoxy-2'-fluoro-guanosine-3'-phosphate
  modified_base 7: mod_base = OTHER; note = 2'-O-methyl-adenosine-3'-phosphate
  modified_base 8: mod_base = OTHER; note = 2'-deoxy-2'-fluoro-guanosine-3'-phosphate
  modified_base 9: mod_base = OTHER; note = 2'-deoxy-2'-fluoro-cytidine-3'-phosphate
  modified_base 10: mod_base = OTHER; note = 2'-O-methyl-cytidine-3'-phosphate
  modified_base 11: mod_base = OTHER; note = 2'-O-methyl-adenosine-3'-phosphate
  modified_base 12: mod_base = OTHER; note = 2'-O-methyl-uridine-3'-phosphate
  modified_base 13: mod_base = OTHER; note = 2'-O-methyl-guanosine-3'-phosphate
  modified_base 14: mod_base = OTHER; note = 2'-deoxy-2'-fluoro-uridine-3'-phosphate
  modified_base 15: mod_base = OTHER; note = 2'-O-methyl-uridine-3'-phosphate
  modified_base 16: mod_base = OTHER; note = 2'-deoxy-2'-fluoro-guanosine-3'-phosphate
  modified_base 17: mod_base = OTHER; note = 2'-O-methyl-adenosine-3'-phosphate
  modified_base 18: mod_base = OTHER; note = 2'-O-methyl-guanosine-3'-phosphate
  modified_base 19: mod_base = OTHER; note = 2'-O-methyl-guanosine-3'-phosphorothioate
  modified_base 20: mod_base = OTHER; note = 2'-O-methyl-uridine-3'-phosphorothioate
  modified_base 21: mod_base = OTHER; note = 2'-O-methyl-uridine-3'-phosphate
tttgtgagccatgttgaggtt

SEQ ID NO: 1986 - RNA, 21 nt, synthetic construct
  source 1..21: mol_type = other RNA
  modified_base 1: mod_base = OTHER; note = 2'-O-methyl-uridine-3'-phosphorothioate
  modified_base 2: mod_base = OTHER; note = 2'-deoxy-2'-fluoro-uridine-3'-phosphorothioate
  modified_base 3: mod_base = OTHER; note = 2'-O-methyl-uridine-3'-phosphate
  modified_base 4: mod_base = OTHER; note = 2'-O-methyl-uridine-3'-phosphate
  modified_base 5: mod_base = OTHER; note = 2'-O-methyl-guanosine-3'-phosphate
  modified_base 6: mod_base = OTHER; note = 2'-deoxy-2'-fluoro-uridine-3'-phosphate
  modified_base 7: mod_base = OTHER; note = 2'-O-methyl-guanosine-3'-phosphate
  modified_base 8: mod_base = OTHER; note = 2'-deoxy-2'-fluoro-adenosine-3'-phosphate
  modified_base 9: mod_base = OTHER; note = 2'-deoxy-2'-fluoro-guanosine-3'-phosphate
  modified_base 10: mod_base = OTHER; note = 2'-O-methyl-cytidine-3'-phosphate
  modified_base 11: mod_base = OTHER; note = 2'-O-methyl-cytidine-3'-phosphate
  modified_base 12: mod_base = OTHER; note = 2'-O-methyl-adenosine-3'-phosphate
  modified_base 13: mod_base = OTHER; note = 2'-O-methyl-uridine-3'-phosphate
  modified_base 14: mod_base = OTHER; note = 2'-deoxy-2'-fluoro-guanosine-3'-phosphate
  modified_base 15: mod_base = OTHER; note = 2'-O-methyl-uridine-3'-phosphate
  modified_base 16: mod_base = OTHER; note = 2'-deoxy-2'-fluoro-uridine-3'-phosphate
  modified_base 17: mod_base = OTHER; note = 2'-O-methyl-guanosine-3'-phosphate
  modified_base 18: mod_base = OTHER; note = 2'-O-methyl-adenosine-3'-phosphate
  modified_base 19: mod_base = OTHER; note = 2'-O-methyl-guanosine-3'-phosphorothioate
  modified_base 20: mod_base = OTHER; note = 2'-O-methyl-uridine-3'-phosphorothioate
  modified_base 21: mod_base = OTHER; note = 2'-O-methyl-uridine-3'-phosphate
ttttgtgagccatgttgagtt

SEQ ID NO: 1987 - RNA, 21 nt, synthetic construct
  source 1..21: mol_type = other RNA
  modified_base 1: mod_base = OTHER; note = 2'-O-methyl-uridine-3'-phosphorothioate
  modified_base 2: mod_base = OTHER; note = 2'-deoxy-2'-fluoro-adenosine-3'-phosphorothioate
  modified_base 3: mod_base = OTHER; note = 2'-O-methyl-uridine-3'-phosphate
  modified_base 4: mod_base = OTHER; note = 2'-O-methyl-uridine-3'-phosphate
  modified_base 5: mod_base = OTHER; note = 2'-O-methyl-uridine-3'-phosphate
  modified_base 6: mod_base = OTHER; note = 2'-deoxy-2'-fluoro-guanosine-3'-phosphate
  modified_base 7: mod_base = OTHER; note = 2'-O-methyl-uridine-3'-phosphate
  modified_base 8: mod_base = OTHER; note = 2'-deoxy-2'-fluoro-guanosine-3'-phosphate
  modified_base 9: mod_base = OTHER; note = 2'-deoxy-2'-fluoro-adenosine-3'-phosphate
  modified_base 10: mod_base = OTHER; note = 2'-O-methyl-guanosine-3'-phosphate
  modified_base 11: mod_base = OTHER; note = 2'-O-methyl-cytidine-3'-phosphate
  modified_base 12: mod_base = OTHER; note = 2'-O-methyl-cytidine-3'-phosphate
  modified_base 13: mod_base = OTHER; note = 2'-O-methyl-adenosine-3'-phosphate
  modified_base 14: mod_base = OTHER; note = 2'-deoxy-2'-fluoro-uridine-3'-phosphate
  modified_base 15: mod_base = OTHER; note = 2'-O-methyl-guanosine-3'-phosphate
  modified_base 16: mod_base = OTHER; note = 2'-deoxy-2'-fluoro-uridine-3'-phosphate
  modified_base 17: mod_base = OTHER; note = 2'-O-methyl-uridine-3'-phosphate
  modified_base 18: mod_base = OTHER; note = 2'-O-methyl-guanosine-3'-phosphate
  modified_base 19: mod_base = OTHER; note = 2'-O-methyl-adenosine-3'-phosphorothioate
  modified_base 20: mod_base = OTHER; note = 2'-O-methyl-uridine-3'-phosphorothioate
  modified_base 21: mod_base = OTHER; note = 2'-O-methyl-uridine-3'-phosphate
tatttgtgagccatgttgatt

SEQ ID NO: 1988 - RNA, 21 nt, synthetic construct
  source 1..21: mol_type = other RNA
  modified_base 1: mod_base = OTHER; note = 2'-O-methyl-uridine-3'-phosphorothioate
  modified_base 2: mod_base = OTHER; note = 2'-deoxy-2'-fluoro-adenosine-3'-phosphorothioate
  modified_base 3: mod_base = OTHER; note = 2'-O-methyl-adenosine-3'-phosphate
  modified_base 4: mod_base = OTHER; note = 2'-O-methyl-uridine-3'-phosphate
  modified_base 5: mod_base = OTHER; note = 2'-O-methyl-uridine-3'-phosphate
  modified_base 6: mod_base = OTHER; note = 2'-deoxy-2'-fluoro-uridine-3'-phosphate
  modified_base 7: mod_base = OTHER; note = 2'-O-methyl-guanosine-3'-phosphate
  modified_base 8: mod_base = OTHER; note = 2'-deoxy-2'-fluoro-uridine-3'-phosphate
  modified_base 9: mod_base = OTHER; note = 2'-deoxy-2'-fluoro-guanosine-3'-phosphate
  modified_base 10: mod_base = OTHER; note = 2'-O-methyl-adenosine-3'-phosphate
  modified_base 11: mod_base = OTHER; note = 2'-O-methyl-guanosine-3'-phosphate
  modified_base 12: mod_base = OTHER; note = 2'-O-methyl-cytidine-3'-phosphate
  modified_base 13: mod_base = OTHER; note = 2'-O-methyl-cytidine-3'-phosphate
  modified_base 14: mod_base = OTHER; note = 2'-deoxy-2'-fluoro-adenosine-3'-phosphate
  modified_base 15: mod_base = OTHER; note = 2'-O-methyl-uridine-3'-phosphate
  modified_base 16: mod_base = OTHER; note = 2'-deoxy-2'-fluoro-guanosine-3'-phosphate
  modified_base 17: mod_base = OTHER; note = 2'-O-methyl-uridine-3'-phosphate
  modified_base 18: mod_base = OTHER; note = 2'-O-methyl-uridine-3'-phosphate
  modified_base 19: mod_base = OTHER; note = 2'-O-methyl-guanosine-3'-phosphorothioate
  modified_base 20: mod_base = OTHER; note = 2'-O-methyl-uridine-3'-phosphorothioate
  modified_base 21: mod_base = OTHER; note = 2'-O-methyl-uridine-3'-phosphate
taatttgtgagccatgttgtt

SEQ ID NO: 1989 - RNA, 21 nt, synthetic construct
  source 1..21: mol_type = other RNA
  modified_base 1: mod_base = OTHER; note = 2'-O-methyl-uridine-3'-phosphorothioate
  modified_base 2: mod_base = OTHER; note = 2'-deoxy-2'-fluoro-cytidine-3'-phosphorothioate
  modified_base 3: mod_base = OTHER; note = 2'-O-methyl-guanosine-3'-phosphate
  modified_base 4: mod_base = OTHER; note = 2'-O-methyl-adenosine-3'-phosphate
  modified_base 5: mod_base = OTHER; note = 2'-O-methyl-guanosine-3'-phosphate
  modified_base 6: mod_base = OTHER; note = 2'-deoxy-2'-fluoro-uridine-3'-phosphate
  modified_base 7: mod_base = OTHER; note = 2'-O-methyl-guanosine-3'-phosphate
  modified_base 8: mod_base = OTHER; note = 2'-deoxy-2'-fluoro-adenosine-3'-phosphate
  modified_base 9: mod_base = OTHER; note = 2'-deoxy-2'-fluoro-guanosine-3'-phosphate
  modified_base 10: mod_base = OTHER; note = 2'-O-methyl-guanosine-3'-phosphate
  modified_base 11: mod_base = OTHER; note = 2'-O-methyl-uridine-3'-phosphate
  modified_base 12: mod_base = OTHER; note = 2'-O-methyl-adenosine-3'-phosphate
  modified_base 13: mod_base = OTHER; note = 2'-O-methyl-uridine-3'-phosphate
  modified_base 14: mod_base = OTHER; note = 2'-deoxy-2'-fluoro-uridine-3'-phosphate
  modified_base 15: mod_base = OTHER; note = 2'-O-methyl-guanosine-3'-phosphate
  modified_base 16: mod_base = OTHER; note = 2'-deoxy-2'-fluoro-guanosine-3'-phosphate
  modified_base 17: mod_base = OTHER; note = 2'-O-methyl-adenosine-3'-phosphate
  modified_base 18: mod_base = OTHER; note = 2'-O-methyl-cytidine-3'-phosphate
  modified_base 19: mod_base = OTHER; note = 2'-O-methyl-uridine-3'-phosphorothioate
  modified_base 20: mod_base = OTHER; note = 2'-O-methyl-uridine-3'-phosphorothioate
  modified_base 21: mod_base = OTHER; note = 2'-O-methyl-uridine-3'-phosphate
tcgagtgaggtattggacttt

SEQ ID NO: 1990 - RNA, 21 nt, synthetic construct
  source 1..21: mol_type = other RNA
  modified_base 1: mod_base = OTHER; note = 2'-O-methyl-uridine-3'-phosphorothioate
  modified_base 2: mod_base = OTHER; note = 2'-deoxy-2'-fluoro-guanosine-3'-phosphorothioate
  modified_base 3: mod_base = OTHER; note = 2'-O-methyl-cytidine-3'-phosphate
  modified_base 4: mod_base = OTHER; note = 2'-O-methyl-guanosine-3'-phosphate
  modified_base 5: mod_base = OTHER; note = 2'-O-methyl-adenosine-3'-phosphate
  modified_base 6: mod_base = OTHER; note = 2'-deoxy-2'-fluoro-guanosine-3'-phosphate
  modified_base 7: mod_base = OTHER; note = 2'-O-methyl-uridine-3'-phosphate
  modified_base 8: mod_base = OTHER; note = 2'-deoxy-2'-fluoro-guanosine-3'-phosphate
  modified_base 9: mod_base = OTHER; note = 2'-deoxy-2'-fluoro-adenosine-3'-phosphate
  modified_base 10: mod_base = OTHER; note = 2'-O-methyl-guanosine-3'-phosphate
  modified_base 11: mod_base = OTHER; note = 2'-O-methyl-guanosine-3'-phosphate
  modified_base 12: mod_base = OTHER; note = 2'-O-methyl-uridine-3'-phosphate
  modified_base 13: mod_base = OTHER; note = 2'-O-methyl-adenosine-3'-phosphate
  modified_base 14: mod_base = OTHER; note = 2'-deoxy-2'-fluoro-uridine-3'-phosphate
  modified_base 15: mod_base = OTHER; note = 2'-O-methyl-uridine-3'-phosphate
  modified_base 16: mod_base = OTHER; note = 2'-deoxy-2'-fluoro-guanosine-3'-phosphate
  modified_base 17: mod_base = OTHER; note = 2'-O-methyl-guanosine-3'-phosphate
  modified_base 18: mod_base = OTHER; note = 2'-O-methyl-adenosine-3'-phosphate
  modified_base 19: mod_base = OTHER; note = 2'-O-methyl-cytidine-3'-phosphorothioate
  modified_base 20: mod_base = OTHER; note = 2'-O-methyl-uridine-3'-phosphorothioate
  modified_base 21: mod_base = OTHER; note = 2'-O-methyl-uridine-3'-phosphate
tgcgagtgaggtattggactt

SEQ ID NO: 1991 - RNA, 21 nt, synthetic construct
  source 1..21: mol_type = other RNA
  modified_base 1: mod_base = OTHER; note = 2'-O-methyl-uridine-3'-phosphorothioate
  modified_base 2: mod_base = OTHER; note = 2'-deoxy-2'-fluoro-guanosine-3'-phosphorothioate
  modified_base 3: mod_base = OTHER; note = 2'-O-methyl-adenosine-3'-phosphate
  modified_base 4: mod_base = OTHER; note = 2'-O-methyl-guanosine-3'-phosphate
  modified_base 5: mod_base = OTHER; note = 2'-O-methyl-cytidine-3'-phosphate
  modified_base 6: mod_base = OTHER; note = 2'-deoxy-2'-fluoro-guanosine-3'-phosphate
  modified_base 7: mod_base = OTHER; note = 2'-O-methyl-adenosine-3'-phosphate
  modified_base 8: mod_base = OTHER; note = 2'-deoxy-2'-fluoro-guanosine-3'-phosphate
  modified_base 9: mod_base = OTHER; note = 2'-deoxy-2'-fluoro-uridine-3'-phosphate
  modified_base 10: mod_base = OTHER; note = 2'-O-methyl-guanosine-3'-phosphate
  modified_base 11: mod_base = OTHER; note = 2'-O-methyl-adenosine-3'-phosphate
  modified_base 12: mod_base = OTHER; note = 2'-O-methyl-guanosine-3'-phosphate
  modified_base 13: mod_base = OTHER; note = 2'-O-methyl-guanosine-3'-phosphate
  modified_base 14: mod_base = OTHER; note = 2'-deoxy-2'-fluoro-uridine-3'-phosphate
  modified_base 15: mod_base = OTHER; note = 2'-O-methyl-adenosine-3'-phosphate
  modified_base 16: mod_base = OTHER; note = 2'-deoxy-2'-fluoro-uridine-3'-phosphate
  modified_base 17: mod_base = OTHER; note = 2'-O-methyl-uridine-3'-phosphate
  modified_base 18: mod_base = OTHER; note = 2'-O-methyl-guanosine-3'-phosphate
  modified_base 19: mod_base = OTHER; note = 2'-O-methyl-guanosine-3'-phosphorothioate
  modified_base 20: mod_base = OTHER; note = 2'-O-methyl-uridine-3'-phosphorothioate
  modified_base 21: mod_base = OTHER; note = 2'-O-methyl-uridine-3'-phosphate
tgagcgagtgaggtattggtt

SEQ ID NO: 1992 - RNA, 21 nt, synthetic construct
  source 1..21: mol_type = other RNA
  modified_base 1: mod_base = OTHER; note = 2'-O-methyl-uridine-3'-phosphorothioate
  modified_base 2: mod_base = OTHER; note = 2'-deoxy-2'-fluoro-uridine-3'-phosphorothioate
  modified_base 3: mod_base = OTHER; note = 2'-O-methyl-guanosine-3'-phosphate
  modified_base 4: mod_base = OTHER; note = 2'-O-methyl-adenosine-3'-phosphate
  modified_base 5: mod_base = OTHER; note = 2'-O-methyl-guanosine-3'-phosphate
  modified_base 6: mod_base = OTHER; note = 2'-deoxy-2'-fluoro-cytidine-3'-phosphate
  modified_base 7: mod_base = OTHER; note = 2'-O-methyl-guanosine-3'-phosphate
  modified_base 8: mod_base = OTHER; note = 2'-deoxy-2'-fluoro-adenosine-3'-phosphate
  modified_base 9: mod_base = OTHER; note = 2'-deoxy-2'-fluoro-guanosine-3'-phosphate
  modified_base 10: mod_base = OTHER; note = 2'-O-methyl-uridine-3'-phosphate
  modified_base 11: mod_base = OTHER; note = 2'-O-methyl-guanosine-3'-phosphate
  modified_base 12: mod_base = OTHER; note = 2'-O-methyl-adenosine-3'-phosphate
  modified_base 13: mod_base = OTHER; note = 2'-O-methyl-guanosine-3'-phosphate
  modified_base 14: mod_base = OTHER; note = 2'-deoxy-2'-fluoro-guanosine-3'-phosphate
  modified_base 15: mod_base = OTHER; note = 2'-O-methyl-uridine-3'-phosphate
  modified_base 16: mod_base = OTHER; note = 2'-deoxy-2'-fluoro-adenosine-3'-phosphate
  modified_base 17: mod_base = OTHER; note = 2'-O-methyl-uridine-3'-phosphate
  modified_base 18: mod_base = OTHER; note = 2'-O-methyl-uridine-3'-phosphate
  modified_base 19: mod_base = OTHER; note = 2'-O-methyl-guanosine-3'-phosphorothioate
  modified_base 20: mod_base = OTHER; note = 2'-O-methyl-uridine-3'-phosphorothioate
  modified_base 21: mod_base = OTHER; note = 2'-O-methyl-uridine-3'-phosphate
ttgagcgagtgaggtattgtt

SEQ ID NO: 1993 - RNA, 21 nt, synthetic construct
  source 1..21: mol_type = other RNA
  modified_base 1: mod_base = OTHER; note = 2'-O-methyl-uridine-3'-phosphorothioate
  modified_base 2: mod_base = OTHER; note = 2'-deoxy-2'-fluoro-adenosine-3'-phosphorothioate
  modified_base 3: mod_base = OTHER; note = 2'-O-methyl-guanosine-3'-phosphate
  modified_base 4: mod_base = OTHER; note = 2'-O-methyl-guanosine-3'-phosphate
  modified_base 5: mod_base = OTHER; note = 2'-O-methyl-cytidine-3'-phosphate
  modified_base 6: mod_base = OTHER; note = 2'-deoxy-2'-fluoro-uridine-3'-phosphate
  modified_base 7: mod_base = OTHER; note = 2'-O-methyl-cytidine-3'-phosphate
  modified_base 8: mod_base = OTHER; note = 2'-deoxy-2'-fluoro-uridine-3'-phosphate
  modified_base 9: mod_base = OTHER; note = 2'-deoxy-2'-fluoro-uridine-3'-phosphate
  modified_base 10: mod_base = OTHER; note = 2'-O-methyl-cytidine-3'-phosphate
  modified_base 11: mod_base = OTHER; note = 2'-O-methyl-uridine-3'-phosphate
  modified_base 12: mod_base = OTHER; note = 2'-O-methyl-uridine-3'-phosphate
  modified_base 13: mod_base = OTHER; note = 2'-O-methyl-adenosine-3'-phosphate
  modified_base 14: mod_base = OTHER; note = 2'-deoxy-2'-fluoro-uridine-3'-phosphate
  modified_base 15: mod_base = OTHER; note = 2'-O-methyl-adenosine-3'-phosphate
  modified_base 16: mod_base = OTHER; note = 2'-deoxy-2'-fluoro-guanosine-3'-phosphate
  modified_base 17: mod_base = OTHER; note = 2'-O-methyl-cytidine-3'-phosphate
  modified_base 18: mod_base = OTHER; note = 2'-O-methyl-uridine-3'-phosphate
  modified_base 19: mod_base = OTHER; note = 2'-O-methyl-guanosine-3'-phosphorothioate
  modified_base 20: mod_base = OTHER; note = 2'-O-methyl-uridine-3'-phosphorothioate
  modified_base 21: mod_base = OTHER; note = 2'-O-methyl-uridine-3'-phosphate
taggctcttcttatagctgtt

SEQ ID NO: 1994 - RNA, 21 nt, synthetic construct
  source 1..21: mol_type = other RNA
  modified_base 1: mod_base = OTHER; note = 2'-O-methyl-uridine-3'-phosphorothioate
  modified_base 2: mod_base = OTHER; note = 2'-deoxy-2'-fluoro-adenosine-3'-phosphorothioate
  modified_base 3: mod_base = OTHER; note = 2'-O-methyl-uridine-3'-phosphate
  modified_base 4: mod_base = OTHER; note = 2'-O-methyl-guanosine-3'-phosphate
  modified_base 5: mod_base = OTHER; note = 2'-O-methyl-guanosine-3'-phosphate
  modified_base 6: mod_base = OTHER; note = 2'-deoxy-2'-fluoro-uridine-3'-phosphate
  modified_base 7: mod_base = OTHER; note = 2'-O-methyl-uridine-3'-phosphate
  modified_base 8: mod_base = OTHER; note = 2'-deoxy-2'-fluoro-guanosine-3'-phosphate
  modified_base 9: mod_base = OTHER; note = 2'-deoxy-2'-fluoro-adenosine-3'-phosphate
  modified_base 10: mod_base = OTHER; note = 2'-O-methyl-guanosine-3'-phosphate
  modified_base 11: mod_base = OTHER; note = 2'-O-methyl-guanosine-3'-phosphate
  modified_base 12: mod_base = OTHER; note = 2'-O-methyl-cytidine-3'-phosphate
  modified_base 13: mod_base = OTHER; note = 2'-O-methyl-uridine-3'-phosphate
  modified_base 14: mod_base = OTHER; note = 2'-deoxy-2'-fluoro-cytidine-3'-phosphate
  modified_base 15: mod_base = OTHER; note = 2'-O-methyl-uridine-3'-phosphate
  modified_base 16: mod_base = OTHER; note = 2'-deoxy-2'-fluoro-uridine-3'-phosphate
  modified_base 17: mod_base = OTHER; note = 2'-O-methyl-cytidine-3'-phosphate
  modified_base 18: mod_base = OTHER; note = 2'-O-methyl-uridine-3'-phosphate
  modified_base 19: mod_base = OTHER; note = 2'-O-methyl-uridine-3'-phosphorothioate
  modified_base 20: mod_base = OTHER; note = 2'-O-methyl-uridine-3'-phosphorothioate
  modified_base 21: mod_base = OTHER; note = 2'-O-methyl-uridine-3'-phosphate
tatggttgaggctcttctttt

SEQ ID NO: 1995 - RNA, 21 nt, synthetic construct
  source 1..21: mol_type = other RNA
  modified_base 1: mod_base = OTHER; note = 2'-O-methyl-uridine-3'-phosphorothioate
  modified_base 2: mod_base = OTHER; note = 2'-deoxy-2'-fluoro-adenosine-3'-phosphorothioate
  modified_base 3: mod_base = OTHER; note = 2'-O-methyl-cytidine-3'-phosphate
  modified_base 4: mod_base = OTHER; note = 2'-O-methyl-adenosine-3'-phosphate
  modified_base 5: mod_base = OTHER; note = 2'-O-methyl-uridine-3'-phosphate
  modified_base 6: mod_base = OTHER; note = 2'-deoxy-2'-fluoro-adenosine-3'-phosphate
  modified_base 7: mod_base = OTHER; note = 2'-O-methyl-uridine-3'-phosphate
  modified_base 8: mod_base = OTHER; note = 2'-deoxy-2'-fluoro-uridine-3'-phosphate
  modified_base 9: mod_base = OTHER; note = 2'-deoxy-2'-fluoro-adenosine-3'-phosphate
  modified_base 10: mod_base = OTHER; note = 2'-O-methyl-adenosine-3'-phosphate
  modified_base 11: mod_base = OTHER; note = 2'-O-methyl-guanosine-3'-phosphate
  modified_base 12: mod_base = OTHER; note = 2'-O-methyl-adenosine-3'-phosphate
  modified_base 13: mod_base = OTHER; note = 2'-O-methyl-uridine-3'-phosphate
  modified_base 14: mod_base = OTHER; note = 2'-deoxy-2'-fluoro-guanosine-3'-phosphate
  modified_base 15: mod_base = OTHER; note = 2'-O-methyl-adenosine-3'-phosphate
  modified_base 16: mod_base = OTHER; note = 2'-deoxy-2'-fluoro-guanosine-3'-phosphate
  modified_base 17: mod_base = OTHER; note = 2'-O-methyl-adenosine-3'-phosphate
  modified_base 18: mod_base = OTHER; note = 2'-O-methyl-cytidine-3'-phosphate
  modified_base 19: mod_base = OTHER; note = 2'-O-methyl-adenosine-3'-phosphorothioate
  modified_base 20: mod_base = OTHER; note = 2'-O-methyl-uridine-3'-phosphorothioate
  modified_base 21: mod_base = OTHER; note = 2'-O-methyl-uridine-3'-phosphate
tacatattaagatgagacatt

SEQ ID NO: 1996 - RNA, 21 nt, synthetic construct
  source 1..21: mol_type = other RNA
  modified_base 1: mod_base = OTHER; note = 2'-O-methyl-uridine-3'-phosphorothioate
  modified_base 2: mod_base = OTHER; note = 2'-deoxy-2'-fluoro-guanosine-3'-phosphorothioate
  modified_base 3: mod_base = OTHER; note = 2'-O-methyl-adenosine-3'-phosphate
  modified_base 4: mod_base = OTHER; note = 2'-O-methyl-cytidine-3'-phosphate
  modified_base 5: mod_base = OTHER; note = 2'-O-methyl-adenosine-3'-phosphate
  modified_base 6: mod_base = OTHER; note = 2'-deoxy-2'-fluoro-uridine-3'-phosphate
  modified_base 7: mod_base = OTHER; note = 2'-O-methyl-adenosine-3'-phosphate
  modified_base 8: mod_base = OTHER; note = 2'-deoxy-2'-fluoro-uridine-3'-phosphate
  modified_base 9: mod_base = OTHER; note = 2'-deoxy-2'-fluoro-uridine-3'-phosphate
  modified_base 10: mod_base = OTHER; note = 2'-O-methyl-adenosine-3'-phosphate
  modified_base 11: mod_base = OTHER; note = 2'-O-methyl-adenosine-3'-phosphate
  modified_base 12: mod_base = OTHER; note = 2'-O-methyl-guanosine-3'-phosphate
  modified_base 13: mod_base = OTHER; note = 2'-O-methyl-adenosine-3'-phosphate
  modified_base 14: mod_base = OTHER; note = 2'-deoxy-2'-fluoro-uridine-3'-phosphate
  modified_base 15: mod_base = OTHER; note = 2'-O-methyl-guanosine-3'-phosphate
  modified_base 16: mod_base = OTHER; note = 2'-deoxy-2'-fluoro-adenosine-3'-phosphate
  modified_base 17: mod_base = OTHER; note = 2'-O-methyl-guanosine-3'-phosphate
  modified_base 18: mod_base = OTHER; note = 2'-O-methyl-adenosine-3'-phosphate
  modified_base 19: mod_base = OTHER; note = 2'-O-methyl-cytidine-3'-phosphorothioate
  modified_base 20: mod_base = OTHER; note = 2'-O-methyl-uridine-3'-phosphorothioate
  modified_base 21: mod_base = OTHER; note = 2'-O-methyl-uridine-3'-phosphate
tgacatattaagatgagactt

SEQ ID NO: 1997 - RNA, 21 nt, synthetic construct
  source 1..21: mol_type = other RNA
  modified_base 1: mod_base = OTHER; note = 2'-O-methyl-uridine-3'-phosphorothioate
  modified_base 2: mod_base = OTHER; note = 2'-deoxy-2'-fluoro-adenosine-3'-phosphorothioate
  modified_base 3: mod_base = OTHER; note = 2'-O-methyl-guanosine-3'-phosphate
  modified_base 4: mod_base = OTHER; note = 2'-O-methyl-adenosine-3'-phosphate
  modified_base 5: mod_base = OTHER; note = 2'-O-methyl-cytidine-3'-phosphate
  modified_base 6: mod_base = OTHER; note = 2'-deoxy-2'-fluoro-adenosine-3'-phosphate
  modified_base 7: mod_base = OTHER; note = 2'-O-methyl-uridine-3'-phosphate
  modified_base 8: mod_base = OTHER; note = 2'-deoxy-2'-fluoro-adenosine-3'-phosphate
  modified_base 9: mod_base = OTHER; note = 2'-deoxy-2'-fluoro-uridine-3'-phosphate
  modified_base 10: mod_base = OTHER; note = 2'-O-methyl-uridine-3'-phosphate
  modified_base 11: mod_base = OTHER; note = 2'-O-methyl-adenosine-3'-phosphate
  modified_base 12: mod_base = OTHER; note = 2'-O-methyl-adenosine-3'-phosphate
  modified_base 13: mod_base = OTHER; note = 2'-O-methyl-guanosine-3'-phosphate
  modified_base 14: mod_base = OTHER; note = 2'-deoxy-2'-fluoro-adenosine-3'-phosphate
  modified_base 15: mod_base = OTHER; note = 2'-O-methyl-uridine-3'-phosphate
  modified_base 16: mod_base = OTHER; note = 2'-deoxy-2'-fluoro-guanosine-3'-phosphate
  modified_base 17: mod_base = OTHER; note = 2'-O-methyl-adenosine-3'-phosphate
  modified_base 18: mod_base = OTHER; note = 2'-O-methyl-guanosine-3'-phosphate
  modified_base 19: mod_base = OTHER; note = 2'-O-methyl-adenosine-3'-phosphorothioate
  modified_base 20: mod_base = OTHER; note = 2'-O-methyl-uridine-3'-phosphorothioate
  modified_base 21: mod_base = OTHER; note = 2'-O-methyl-uridine-3'-phosphate
tagacatattaagatgagatt

SEQ ID NO: 1998 - RNA, 21 nt, synthetic construct
  source 1..21: mol_type = other RNA
  modified_base 1: mod_base = OTHER; note = 2'-O-methyl-uridine-3'-phosphorothioate
  modified_base 2: mod_base = OTHER; note = 2'-deoxy-2'-fluoro-guanosine-3'-phosphorothioate
  modified_base 3: mod_base = OTHER; note = 2'-O-methyl-adenosine-3'-phosphate
  modified_base 4: mod_base = OTHER; note = 2'-O-methyl-guanosine-3'-phosphate
  modified_base 5: mod_base = OTHER; note = 2'-O-methyl-adenosine-3'-phosphate
  modified_base 6: mod_base = OTHER; note = 2'-deoxy-2'-fluoro-cytidine-3'-phosphate
  modified_base 7: mod_base = OTHER; note = 2'-O-methyl-adenosine-3'-phosphate
  modified_base 8: mod_base = OTHER; note = 2'-deoxy-2'-fluoro-uridine-3'-phosphate
  modified_base 9: mod_base = OTHER; note = 2'-deoxy-2'-fluoro-adenosine-3'-phosphate
  modified_base 10: mod_base = OTHER; note = 2'-O-methyl-uridine-3'-phosphate
  modified_base 11: mod_base = OTHER; note = 2'-O-methyl-uridine-3'-phosphate
  modified_base 12: mod_base = OTHER; note = 2'-O-methyl-adenosine-3'-phosphate
  modified_base 13: mod_base = OTHER; note = 2'-O-methyl-adenosine-3'-phosphate
  modified_base 14: mod_base = OTHER; note = 2'-deoxy-2'-fluoro-guanosine-3'-phosphate
  modified_base 15: mod_base = OTHER; note = 2'-O-methyl-adenosine-3'-phosphate
  modified_base 16: mod_base = OTHER; note = 2'-deoxy-2'-fluoro-uridine-3'-phosphate
  modified_base 17: mod_base = OTHER; note = 2'-O-methyl-guanosine-3'-phosphate
  modified_base 18: mod_base = OTHER; note = 2'-O-methyl-adenosine-3'-phosphate
  modified_base 19: mod_base = OTHER; note = 2'-O-methyl-guanosine-3'-phosphorothioate
  modified_base 20: mod_base = OTHER; note = 2'-O-methyl-uridine-3'-phosphorothioate
  modified_base 21: mod_base = OTHER; note = 2'-O-methyl-uridine-3'-phosphate
tgagacatattaagatgagtt

SEQ ID NO: 1999 - RNA, 21 nt, synthetic construct
  source 1..21: mol_type = other RNA
  modified_base 1: mod_base = OTHER; note = 2'-O-methyl-uridine-3'-phosphorothioate
  modified_base 2: mod_base = OTHER; note = 2'-deoxy-2'-fluoro-cytidine-3'-phosphorothioate
  modified_base 3: mod_base = OTHER; note = 2'-O-methyl-adenosine-3'-phosphate
  modified_base 4: mod_base = OTHER; note = 2'-O-methyl-adenosine-3'-phosphate
  modified_base 5: mod_base = OTHER; note = 2'-O-methyl-guanosine-3'-phosphate
  modified_base 6: mod_base = OTHER; note = 2'-deoxy-2'-fluoro-adenosine-3'-phosphate
  modified_base 7: mod_base = OTHER; note = 2'-O-methyl-guanosine-3'-phosphate
  modified_base 8: mod_base = OTHER; note = 2'-deoxy-2'-fluoro-adenosine-3'-phosphate
  modified_base 9: mod_base = OTHER; note = 2'-deoxy-2'-fluoro-cytidine-3'-phosphate
  modified_base 10: mod_base = OTHER; note = 2'-O-methyl-adenosine-3'-phosphate
  modified_base 11: mod_base = OTHER; note = 2'-O-methyl-uridine-3'-phosphate
  modified_base 12: mod_base = OTHER; note = 2'-O-methyl-adenosine-3'-phosphate
  modified_base 13: mod_base = OTHER; note = 2'-O-methyl-uridine-3'-phosphate
  modified_base 14: mod_base = OTHER; note = 2'-deoxy-2'-fluoro-uridine-3'-phosphate
  modified_base 15: mod_base = OTHER; note = 2'-O-methyl-adenosine-3'-phosphate
  modified_base 16: mod_base = OTHER; note = 2'-deoxy-2'-fluoro-adenosine-3'-phosphate
  modified_base 17: mod_base = OTHER; note = 2'-O-methyl-guanosine-3'-phosphate
  modified_base 18: mod_base = OTHER; note = 2'-O-methyl-adenosine-3'-phosphate
  modified_base 19: mod_base = OTHER; note = 2'-O-methyl-uridine-3'-phosphorothioate
  modified_base 20: mod_base = OTHER; note = 2'-O-methyl-uridine-3'-phosphorothioate
  modified_base 21: mod_base = OTHER; note = 2'-O-methyl-uridine-3'-phosphate
tcaagagacatattaagattt

SEQ ID NO: 2000 - RNA, 21 nt, synthetic construct
  source 1..21: mol_type = other RNA
  modified_base 1: mod_base = OTHER; note = 2'-O-methyl-uridine-3'-phosphorothioate
  modified_base 2: mod_base = OTHER; note = 2'-deoxy-2'-fluoro-guanosine-3'-phosphorothioate
  modified_base 3: mod_base = OTHER; note = 2'-O-methyl-cytidine-3'-phosphate
  modified_base 4: mod_base = OTHER; note = 2'-O-methyl-adenosine-3'-phosphate
  modified_base 5: mod_base = OTHER; note = 2'-O-methyl-adenosine-3'-phosphate
  modified_base 6: mod_base = OTHER; note = 2'-deoxy-2'-fluoro-guanosine-3'-phosphate
  modified_base 7: mod_base = OTHER; note = 2'-O-methyl-adenosine-3'-phosphate
  modified_base 8: mod_base = OTHER; note = 2'-deoxy-2'-fluoro-guanosine-3'-phosphate
  modified_base 9: mod_base = OTHER; note = 2'-deoxy-2'-fluoro-adenosine-3'-phosphate
  modified_base 10: mod_base = OTHER; note = 2'-O-methyl-cytidine-3'-phosphate
  modified_base 11: mod_base = OTHER; note = 2'-O-methyl-adenosine-3'-phosphate
  modified_base 12: mod_base = OTHER; note = 2'-O-methyl-uridine-3'-phosphate
  modified_base 13: mod_base = OTHER; note = 2'-O-methyl-adenosine-3'-phosphate
  modified_base 14: mod_base = OTHER; note = 2'-deoxy-2'-fluoro-uridine-3'-phosphate
  modified_base 15: mod_base = OTHER; note = 2'-O-methyl-uridine-3'-phosphate
  modified_base 16: mod_base = OTHER; note = 2'-deoxy-2'-fluoro-adenosine-3'-phosphate
  modified_base 17: mod_base = OTHER; note = 2'-O-methyl-adenosine-3'-phosphate
  modified_base 18: mod_base = OTHER; note = 2'-O-methyl-guanosine-3'-phosphate
  modified_base 19: mod_base = OTHER; note = 2'-O-methyl-adenosine-3'-phosphorothioate
  modified_base 20: mod_base = OTHER; note = 2'-O-methyl-uridine-3'-phosphorothioate
  modified_base 21: mod_base = OTHER; note = 2'-O-methyl-uridine-3'-phosphate
tgcaagagacatattaagatt

SEQ ID NO: 2001 - RNA, 21 nt, synthetic construct
  source 1..21: mol_type = other RNA
  modified_base 1: mod_base = OTHER; note = 2'-O-methyl-uridine-3'-phosphorothioate
  modified_base 2: mod_base = OTHER; note = 2'-deoxy-2'-fluoro-adenosine-3'-phosphorothioate
  modified_base 3: mod_base = OTHER; note = 2'-O-methyl-guanosine-3'-phosphate
  modified_base 4: mod_base = OTHER; note = 2'-O-methyl-cytidine-3'-phosphate
  modified_base 5: mod_base = OTHER; note = 2'-O-methyl-adenosine-3'-phosphate
  modified_base 6: mod_base = OTHER; note = 2'-deoxy-2'-fluoro-adenosine-3'-phosphate
  modified_base 7: mod_base = OTHER; note = 2'-O-methyl-guanosine-3'-phosphate
  modified_base 8: mod_base = OTHER; note = 2'-deoxy-2'-fluoro-adenosine-3'-phosphate
  modified_base 9: mod_base = OTHER; note = 2'-deoxy-2'-fluoro-guanosine-3'-phosphate
  modified_base 10: mod_base = OTHER; note = 2'-O-methyl-adenosine-3'-phosphate
  modified_base 11: mod_base = OTHER; note = 2'-O-methyl-cytidine-3'-phosphate
  modified_base 12: mod_base = OTHER; note = 2'-O-methyl-adenosine-3'-phosphate
  modified_base 13: mod_base = OTHER; note = 2'-O-methyl-uridine-3'-phosphate
  modified_base 14: mod_base = OTHER; note = 2'-deoxy-2'-fluoro-adenosine-3'-phosphate
  modified_base 15: mod_base = OTHER; note = 2'-O-methyl-uridine-3'-phosphate
  modified_base 16: mod_base = OTHER; note = 2'-deoxy-2'-fluoro-uridine-3'-phosphate
  modified_base 17: mod_base = OTHER; note = 2'-O-methyl-adenosine-3'-phosphate
  modified_base 18: mod_base = OTHER; note = 2'-O-methyl-adenosine-3'-phosphate
  modified_base 19: mod_base = OTHER; note = 2'-O-methyl-guanosine-3'-phosphorothioate
  modified_base 20: mod_base = OTHER; note = 2'-O-methyl-uridine-3'-phosphorothioate
  modified_base 21: mod_base = OTHER; note = 2'-O-methyl-uridine-3'-phosphate
tagcaagagacatattaagtt

SEQ ID NO: 2002 - RNA, 21 nt, synthetic construct
  source 1..21: mol_type = other RNA
  modified_base 1: mod_base = OTHER; note = 2'-O-methyl-uridine-3'-phosphorothioate
  modified_base 2: mod_base = OTHER; note = 2'-deoxy-2'-fluoro-cytidine-3'-phosphorothioate
  modified_base 3: mod_base = OTHER; note = 2'-O-methyl-adenosine-3'-phosphate
  modified_base 4: mod_base = OTHER; note = 2'-O-methyl-guanosine-3'-phosphate
  modified_base 5: mod_base = OTHER; note = 2'-O-methyl-cytidine-3'-phosphate
  modified_base 6: mod_base = OTHER; note = 2'-deoxy-2'-fluoro-adenosine-3'-phosphate
  modified_base 7: mod_base = OTHER; note = 2'-O-methyl-adenosine-3'-phosphate
  modified_base 8: mod_base = OTHER; note = 2'-deoxy-2'-fluoro-guanosine-3'-phosphate
  modified_base 9: mod_base = OTHER; note = 2'-deoxy-2'-fluoro-adenosine-3'-phosphate
  modified_base 10: mod_base = OTHER; note = 2'-O-methyl-guanosine-3'-phosphate
  modified_base 11: mod_base = OTHER; note = 2'-O-methyl-adenosine-3'-phosphate
  modified_base 12: mod_base = OTHER; note = 2'-O-methyl-cytidine-3'-phosphate
  modified_base 13: mod_base = OTHER; note = 2'-O-methyl-adenosine-3'-phosphate
  modified_base 14: mod_base = OTHER; note = 2'-deoxy-2'-fluoro-uridine-3'-phosphate
  modified_base 15: mod_base = OTHER; note = 2'-O-methyl-adenosine-3'-phosphate
  modified_base 16: mod_base = OTHER; note = 2'-deoxy-2'-fluoro-uridine-3'-phosphate
  modified_base 17: mod_base = OTHER; note = 2'-O-methyl-uridine-3'-phosphate
  modified_base 18: mod_base = OTHER; note = 2'-O-methyl-adenosine-3'-phosphate
  modified_base 19: mod_base = OTHER; note = 2'-O-methyl-adenosine-3'-phosphorothioate
  modified_base 20: mod_base = OTHER; note = 2'-O-methyl-uridine-3'-phosphorothioate
  modified_base 21: mod_base = OTHER; note = 2'-O-methyl-uridine-3'-phosphate
tcagcaagagacatattaatt

SEQ ID NO: 2003 - RNA, 21 nt, synthetic construct
  source 1..21: mol_type = other RNA
  modified_base 1: mod_base = OTHER; note = 2'-O-methyl-uridine-3'-phosphorothioate
  modified_base 2: mod_base = OTHER; note = 2'-deoxy-2'-fluoro-uridine-3'-phosphorothioate
  modified_base 3: mod_base = OTHER; note = 2'-O-methyl-cytidine-3'-phosphate
  modified_base 4: mod_base = OTHER; note = 2'-O-methyl-adenosine-3'-phosphate
  modified_base 5: mod_base = OTHER; note = 2'-O-methyl-guanosine-3'-phosphate
  modified_base 6: mod_base = OTHER; note = 2'-deoxy-2'-fluoro-cytidine-3'-phosphate
  modified_base 7: mod_base = OTHER; note = 2'-O-methyl-adenosine-3'-phosphate
  modified_base 8: mod_base = OTHER; note = 2'-deoxy-2'-fluoro-adenosine-3'-phosphate
  modified_base 9: mod_base = OTHER; note = 2'-deoxy-2'-fluoro-guanosine-3'-phosphate
  modified_base 10: mod_base = OTHER; note = 2'-O-methyl-adenosine-3'-phosphate
  modified_base 11: mod_base = OTHER; note = 2'-O-methyl-guanosine-3'-phosphate
  modified_base 12: mod_base = OTHER; note = 2'-O-methyl-adenosine-3'-phosphate
  modified_base 13: mod_base = OTHER; note = 2'-O-methyl-cytidine-3'-phosphate
  modified_base 14: mod_base = OTHER; note = 2'-deoxy-2'-fluoro-adenosine-3'-phosphate
  modified_base 15: mod_base = OTHER; note = 2'-O-methyl-uridine-3'-phosphate
  modified_base 16: mod_base = OTHER; note = 2'-deoxy-2'-fluoro-adenosine-3'-phosphate
  modified_base 17: mod_base = OTHER; note = 2'-O-methyl-uridine-3'-phosphate
  modified_base 18: mod_base = OTHER; note = 2'-O-methyl-uridine-3'-phosphate
  modified_base 19: mod_base = OTHER; note = 2'-O-methyl-adenosine-3'-phosphorothioate
  modified_base 20: mod_base = OTHER; note = 2'-O-methyl-uridine-3'-phosphorothioate
  modified_base 21: mod_base = OTHER; note = 2'-O-methyl-uridine-3'-phosphate
ttcagcaagagacatattatt

SEQ ID NO: 2004 - RNA, 21 nt, synthetic construct
  source 1..21: mol_type = other RNA
  modified_base 1: mod_base = OTHER; note = 2'-O-methyl-uridine-3'-phosphorothioate
  modified_base 2: mod_base = OTHER; note = 2'-deoxy-2'-fluoro-adenosine-3'-phosphorothioate
  modified_base 3: mod_base = OTHER; note = 2'-O-methyl-uridine-3'-phosphate
  modified_base 4: mod_base = OTHER; note = 2'-O-methyl-cytidine-3'-phosphate
  modified_base 5: mod_base = OTHER; note = 2'-O-methyl-adenosine-3'-phosphate
  modified_base 6: mod_base = OTHER; note = 2'-deoxy-2'-fluoro-guanosine-3'-phosphate
  modified_base 7: mod_base = OTHER; note = 2'-O-methyl-cytidine-3'-phosphate
  modified_base 8: mod_base = OTHER; note = 2'-deoxy-2'-fluoro-adenosine-3'-phosphate
  modified_base 9: mod_base = OTHER; note = 2'-deoxy-2'-fluoro-adenosine-3'-phosphate
  modified_base 10: mod_base = OTHER; note = 2'-O-methyl-guanosine-3'-phosphate
  modified_base 11: mod_base = OTHER; note = 2'-O-methyl-adenosine-3'-phosphate
  modified_base 12: mod_base = OTHER; note = 2'-O-methyl-guanosine-3'-phosphate
  modified_base 13: mod_base = OTHER; note = 2'-O-methyl-adenosine-3'-phosphate
  modified_base 14: mod_base = OTHER; note = 2'-deoxy-2'-fluoro-cytidine-3'-phosphate
  modified_base 15: mod_base = OTHER; note = 2'-O-methyl-adenosine-3'-phosphate
  modified_base 16: mod_base = OTHER; note = 2'-deoxy-2'-fluoro-uridine-3'-phosphate
  modified_base 17: mod_base = OTHER; note = 2'-O-methyl-adenosine-3'-phosphate
  modified_base 18: mod_base = OTHER; note = 2'-O-methyl-uridine-3'-phosphate
  modified_base 19: mod_base = OTHER; note = 2'-O-methyl-uridine-3'-phosphorothioate
  modified_base 20: mod_base = OTHER; note = 2'-O-methyl-uridine-3'-phosphorothioate
  modified_base 21: mod_base = OTHER; note = 2'-O-methyl-uridine-3'-phosphate
tatcagcaagagacatatttt

SEQ ID NO: 2005 - RNA, 21 nt, synthetic construct
  source 1..21: mol_type = other RNA
  modified_base 1: mod_base = OTHER; note = 2'-O-methyl-uridine-3'-phosphorothioate
  modified_base 2: mod_base = OTHER; note = 2'-deoxy-2'-fluoro-guanosine-3'-phosphorothioate
  modified_base 3: mod_base = OTHER; note = 2'-O-methyl-adenosine-3'-phosphate
  modified_base 4: mod_base = OTHER; note = 2'-O-methyl-uridine-3'-phosphate
  modified_base 5: mod_base = OTHER; note = 2'-O-methyl-cytidine-3'-phosphate
  modified_base 6: mod_base = OTHER; note = 2'-deoxy-2'-fluoro-adenosine-3'-phosphate
  modified_base 7: mod_base = OTHER; note = 2'-O-methyl-guanosine-3'-phosphate
  modified_base 8: mod_base = OTHER; note = 2'-deoxy-2'-fluoro-cytidine-3'-phosphate
  modified_base 9: mod_base = OTHER; note = 2'-deoxy-2'-fluoro-adenosine-3'-phosphate
  modified_base 10: mod_base = OTHER; note = 2'-O-methyl-adenosine-3'-phosphate
  modified_base 11: mod_base = OTHER; note = 2'-O-methyl-guanosine-3'-phosphate
  modified_base 12: mod_base = OTHER; note = 2'-O-methyl-adenosine-3'-phosphate
  modified_base 13: mod_base = OTHER; note = 2'-O-methyl-guanosine-3'-phosphate
  modified_base 14: mod_base = OTHER; note = 2'-deoxy-2'-fluoro-adenosine-3'-phosphate
  modified_base 15: mod_base = OTHER; note = 2'-O-methyl-cytidine-3'-phosphate
  modified_base 16: mod_base = OTHER; note = 2'-deoxy-2'-fluoro-adenosine-3'-phosphate
  modified_base 17: mod_base = OTHER; note = 2'-O-methyl-uridine-3'-phosphate
  modified_base 18: mod_base = OTHER; note = 2'-O-methyl-adenosine-3'-phosphate
  modified_base 19: mod_base = OTHER; note = 2'-O-methyl-uridine-3'-phosphorothioate
  modified_base 20: mod_base = OTHER; note = 2'-O-methyl-uridine-3'-phosphorothioate
  modified_base 21: mod_base = OTHER; note = 2'-O-methyl-uridine-3'-phosphate
tgatcagcaagagacatattt

SEQ ID NO: 2006 - RNA, 21 nt, synthetic construct
  source 1..21: mol_type = other RNA
  modified_base 1: mod_base = OTHER; note = 2'-O-methyl-uridine-3'-phosphorothioate
  modified_base 2: mod_base = OTHER; note = 2'-deoxy-2'-fluoro-cytidine-3'-phosphorothioate
  modified_base 3: mod_base = OTHER; note = 2'-O-methyl-adenosine-3'-phosphate
  modified_base 4: mod_base = OTHER; note = 2'-O-methyl-guanosine-3'-phosphate
  modified_base 5: mod_base = OTHER; note = 2'-O-methyl-adenosine-3'-phosphate
  modified_base 6: mod_base = OTHER; note = 2'-deoxy-2'-fluoro-uridine-3'-phosphate
  modified_base 7: mod_base = OTHER; note = 2'-O-methyl-cytidine-3'-phosphate
  modified_base 8: mod_base = OTHER; note = 2'-deoxy-2'-fluoro-adenosine-3'-phosphate
  modified_base 9: mod_base = OTHER; note = 2'-deoxy-2'-fluoro-guanosine-3'-phosphate
  modified_base 10: mod_base = OTHER; note = 2'-O-methyl-cytidine-3'-phosphate
  modified_base 11: mod_base = OTHER; note = 2'-O-methyl-adenosine-3'-phosphate
  modified_base 12: mod_base = OTHER; note = 2'-O-methyl-adenosine-3'-phosphate
  modified_base 13: mod_base = OTHER; note = 2'-O-methyl-guanosine-3'-phosphate
  modified_base 14: mod_base = OTHER; note = 2'-deoxy-2'-fluoro-adenosine-3'-phosphate
  modified_base 15: mod_base = OTHER; note = 2'-O-methyl-guanosine-3'-phosphate
  modified_base 16: mod_base = OTHER; note = 2'-deoxy-2'-fluoro-adenosine-3'-phosphate
  modified_base 17: mod_base = OTHER; note = 2'-O-methyl-cytidine-3'-phosphate
  modified_base 18: mod_base = OTHER; note = 2'-O-methyl-adenosine-3'-phosphate
  modified_base 19: mod_base = OTHER; note = 2'-O-methyl-uridine-3'-phosphorothioate
  modified_base 20: mod_base = OTHER; note = 2'-O-methyl-uridine-3'-phosphorothioate
  modified_base 21: mod_base = OTHER; note = 2'-O-methyl-uridine-3'-phosphate
tcagatcagcaagagacattt

SEQ ID NO: 2007 - RNA, 21 nt, synthetic construct
  source 1..21: mol_type = other RNA
  modified_base 1: mod_base = OTHER; note = 2'-O-methyl-uridine-3'-phosphorothioate
  modified_base 2: mod_base = OTHER; note = 2'-deoxy-2'-fluoro-adenosine-3'-phosphorothioate
  modified_base 3: mod_base = OTHER; note = 2'-O-methyl-cytidine-3'-phosphate
  modified_base 4: mod_base = OTHER; note = 2'-O-methyl-adenosine-3'-phosphate
  modified_base 5: mod_base = OTHER; note = 2'-O-methyl-guanosine-3'-phosphate
  modified_base 6: mod_base = OTHER; note = 2'-deoxy-2'-fluoro-adenosine-3'-phosphate
  modified_base 7: mod_base = OTHER; note = 2'-O-methyl-uridine-3'-phosphate
  modified_base 8: mod_base = OTHER; note = 2'-deoxy-2'-fluoro-cytidine-3'-phosphate
  modified_base 9: mod_base = OTHER; note = 2'-deoxy-2'-fluoro-adenosine-3'-phosphate
  modified_base 10: mod_base = OTHER; note = 2'-O-methyl-guanosine-3'-phosphate
  modified_base 11: mod_base = OTHER; note = 2'-O-methyl-cytidine-3'-phosphate
  modified_base 12: mod_base = OTHER; note = 2'-O-methyl-adenosine-3'-phosphate
  modified_base 13: mod_base = OTHER; note = 2'-O-methyl-adenosine-3'-phosphate
  modified_base 14: mod_base = OTHER; note = 2'-deoxy-2'-fluoro-guanosine-3'-phosphate
  modified_base 15: mod_base = OTHER; note = 2'-O-methyl-adenosine-3'-phosphate
  modified_base 16: mod_base = OTHER; note = 2'-deoxy-2'-fluoro-guanosine-3'-phosphate
  modified_base 17: mod_base = OTHER; note = 2'-O-methyl-adenosine-3'-phosphate
  modified_base 18: mod_base = OTHER; note = 2'-O-methyl-cytidine-3'-phosphate
  modified_base 19: mod_base = OTHER; note = 2'-O-methyl-adenosine-3'-phosphorothioate
  modified_base 20: mod_base = OTHER; note = 2'-O-methyl-uridine-3'-phosphorothioate
  modified_base 21: mod_base = OTHER; note = 2'-O-methyl-uridine-3'-phosphate
tacagatcagcaagagacatt

SEQ ID NO: 2008 - RNA, 21 nt, synthetic construct
  source 1..21: mol_type = other RNA
  modified_base 1: mod_base = OTHER; note = 2'-O-methyl-uridine-3'-phosphorothioate
  modified_base 2: mod_base = OTHER; note = 2'-deoxy-2'-fluoro-guanosine-3'-phosphorothioate
  modified_base 3: mod_base = OTHER; note = 2'-O-methyl-adenosine-3'-phosphate
  modified_base 4: mod_base = OTHER; note = 2'-O-methyl-uridine-3'-phosphate
  modified_base 5: mod_base = OTHER; note = 2'-O-methyl-guanosine-3'-phosphate
  modified_base 6: mod_base = OTHER; note = 2'-deoxy-2'-fluoro-adenosine-3'-phosphate
  modified_base 7: mod_base = OTHER; note = 2'-O-methyl-uridine-3'-phosphate
  modified_base 8: mod_base = OTHER; note = 2'-deoxy-2'-fluoro-adenosine-3'-phosphate
  modified_base 9: mod_base = OTHER; note = 2'-deoxy-2'-fluoro-cytidine-3'-phosphate
  modified_base 10: mod_base = OTHER; note = 2'-O-methyl-adenosine-3'-phosphate
  modified_base 11: mod_base = OTHER; note = 2'-O-methyl-guanosine-3'-phosphate
  modified_base 12: mod_base = OTHER; note = 2'-O-methyl-adenosine-3'-phosphate
  modified_base 13: mod_base = OTHER; note = 2'-O-methyl-uridine-3'-phosphate
  modified_base 14: mod_base = OTHER; note = 2'-deoxy-2'-fluoro-cytidine-3'-phosphate
  modified_base 15: mod_base = OTHER; note = 2'-O-methyl-adenosine-3'-phosphate
  modified_base 16: mod_base = OTHER; note = 2'-deoxy-2'-fluoro-guanosine-3'-phosphate
  modified_base 17: mod_base = OTHER; note = 2'-O-methyl-cytidine-3'-phosphate
  modified_base 18: mod_base = OTHER; note = 2'-O-methyl-adenosine-3'-phosphate
  modified_base 19: mod_base = OTHER; note = 2'-O-methyl-adenosine-3'-phosphorothioate
  modified_base 20: mod_base = OTHER; note = 2'-O-methyl-uridine-3'-phosphorothioate
  modified_base 21: mod_base = OTHER; note = 2'-O-methyl-uridine-3'-phosphate
tgatgatacagatcagcaatt

SEQ ID NO: 2009 - RNA, 21 nt, synthetic construct
  source 1..21: mol_type = other RNA
  modified_base 1: mod_base = OTHER; note = 2'-O-methyl-uridine-3'-phosphorothioate
  modified_base 2: mod_base = OTHER; note = 2'-deoxy-2'-fluoro-cytidine-3'-phosphorothioate
  modified_base 3: mod_base = OTHER; note = 2'-O-methyl-guanosine-3'-phosphate
  modified_base 4: mod_base = OTHER; note = 2'-O-methyl-adenosine-3'-phosphate
  modified_base 5: mod_base = OTHER; note = 2'-O-methyl-uridine-3'-phosphate
  modified_base 6: mod_base = OTHER; note = 2'-deoxy-2'-fluoro-guanosine-3'-phosphate
  modified_base 7: mod_base = OTHER; note = 2'-O-methyl-adenosine-3'-phosphate
  modified_base 8: mod_base = OTHER; note = 2'-deoxy-2'-fluoro-uridine-3'-phosphate
  modified_base 9: mod_base = OTHER; note = 2'-deoxy-2'-fluoro-adenosine-3'-phosphate
  modified_base 10: mod_base = OTHER; note = 2'-O-methyl-cytidine-3'-phosphate
  modified_base 11: mod_base = OTHER; note = 2'-O-methyl-adenosine-3'-phosphate
  modified_base 12: mod_base = OTHER; note = 2'-O-methyl-guanosine-3'-phosphate
  modified_base 13: mod_base = OTHER; note = 2'-O-methyl-adenosine-3'-phosphate
  modified_base 14: mod_base = OTHER; note = 2'-deoxy-2'-fluoro-uridine-3'-phosphate
  modified_base 15: mod_base = OTHER; note = 2'-O-methyl-cytidine-3'-phosphate
  modified_base 16: mod_base = OTHER; note = 2'-deoxy-2'-fluoro-adenosine-3'-phosphate
  modified_base 17: mod_base = OTHER; note = 2'-O-methyl-guanosine-3'-phosphate
  modified_base 18: mod_base = OTHER; note = 2'-O-methyl-cytidine-3'-phosphate
  modified_base 19: mod_base = OTHER; note = 2'-O-methyl-adenosine-3'-phosphorothioate
  modified_base 20: mod_base = OTHER; note = 2'-O-methyl-uridine-3'-phosphorothioate
  modified_base 21: mod_base = OTHER; note = 2'-O-methyl-uridine-3'-phosphate
tcgatgatacagatcagcatt

SEQ ID NO: 2010 - RNA, 21 nt, synthetic construct
  source 1..21: mol_type = other RNA
  modified_base 1: mod_base = OTHER; note = 2'-O-methyl-uridine-3'-phosphorothioate
  modified_base 2: mod_base = OTHER; note = 2'-deoxy-2'-fluoro-adenosine-3'-phosphorothioate
  modified_base 3: mod_base = OTHER; note = 2'-O-methyl-cytidine-3'-phosphate
  modified_base 4: mod_base = OTHER; note = 2'-O-methyl-guanosine-3'-phosphate
  modified_base 5: mod_base = OTHER; note = 2'-O-methyl-adenosine-3'-phosphate
  modified_base 6: mod_base = OTHER; note = 2'-deoxy-2'-fluoro-uridine-3'-phosphate
  modified_base 7: mod_base = OTHER; note = 2'-O-methyl-guanosine-3'-phosphate
  modified_base 8: mod_base = OTHER; note = 2'-deoxy-2'-fluoro-adenosine-3'-phosphate
  modified_base 9: mod_base = OTHER; note = 2'-deoxy-2'-fluoro-uridine-3'-phosphate
  modified_base 10: mod_base = OTHER; note = 2'-O-methyl-adenosine-3'-phosphate
  modified_base 11: mod_base = OTHER; note = 2'-O-methyl-cytidine-3'-phosphate
  modified_base 12: mod_base = OTHER; note = 2'-O-methyl-adenosine-3'-phosphate
  modified_base 13: mod_base = OTHER; note = 2'-O-methyl-guanosine-3'-phosphate
  modified_base 14: mod_base = OTHER; note = 2'-deoxy-2'-fluoro-adenosine-3'-phosphate
  modified_base 15: mod_base = OTHER; note = 2'-O-methyl-uridine-3'-phosphate
  modified_base 16: mod_base = OTHER; note = 2'-deoxy-2'-fluoro-cytidine-3'-phosphate
  modified_base 17: mod_base = OTHER; note = 2'-O-methyl-adenosine-3'-phosphate
  modified_base 18: mod_base = OTHER; note = 2'-O-methyl-guanosine-3'-phosphate
  modified_base 19: mod_base = OTHER; note = 2'-O-methyl-cytidine-3'-phosphorothioate
  modified_base 20: mod_base = OTHER; note = 2'-O-methyl-uridine-3'-phosphorothioate
  modified_base 21: mod_base = OTHER; note = 2'-O-methyl-uridine-3'-phosphate
tacgatgatacagatcagctt

SEQ ID NO: 2011 - RNA, 21 nt, synthetic construct
  source 1..21: mol_type = other RNA
  modified_base 1: mod_base = OTHER; note = 2'-O-methyl-uridine-3'-phosphorothioate
  modified_base 2: mod_base = OTHER; note = 2'-deoxy-2'-fluoro-cytidine-3'-phosphorothioate
  modified_base 3: mod_base = OTHER; note = 2'-O-methyl-adenosine-3'-phosphate
  modified_base 4: mod_base = OTHER; note = 2'-O-methyl-cytidine-3'-phosphate
  modified_base 5: mod_base = OTHER; note = 2'-O-methyl-guanosine-3'-phosphate
  modified_base 6: mod_base = OTHER; note = 2'-deoxy-2'-fluoro-adenosine-3'-phosphate
  modified_base 7: mod_base = OTHER; note = 2'-O-methyl-uridine-3'-phosphate
  modified_base 8: mod_base = OTHER; note = 2'-deoxy-2'-fluoro-guanosine-3'-phosphate
  modified_base 9: mod_base = OTHER; note = 2'-deoxy-2'-fluoro-adenosine-3'-phosphate
  modified_base 10: mod_base = OTHER; note = 2'-O-methyl-uridine-3'-phosphate
  modified_base 11: mod_base = OTHER; note = 2'-O-methyl-adenosine-3'-phosphate
  modified_base 12: mod_base = OTHER; note = 2'-O-methyl-cytidine-3'-phosphate
  modified_base 13: mod_base = OTHER; note = 2'-O-methyl-adenosine-3'-phosphate
  modified_base 14: mod_base = OTHER; note = 2'-deoxy-2'-fluoro-guanosine-3'-phosphate
  modified_base 15: mod_base = OTHER; note = 2'-O-methyl-adenosine-3'-phosphate
  modified_base 16: mod_base = OTHER; note = 2'-deoxy-2'-fluoro-uridine-3'-phosphate
  modified_base 17: mod_base = OTHER; note = 2'-O-methyl-cytidine-3'-phosphate
  modified_base 18: mod_base = OTHER; note = 2'-O-methyl-adenosine-3'-phosphate
  modified_base 19: mod_base = OTHER; note = 2'-O-methyl-guanosine-3'-phosphorothioate
  modified_base 20: mod_base = OTHER; note = 2'-O-methyl-uridine-3'-phosphorothioate
  modified_base 21: mod_base = OTHER; note = 2'-O-methyl-uridine-3'-phosphate
tcacgatgatacagatcagtt

SEQ ID NO: 2012 - RNA, 21 nt, synthetic construct
  source 1..21: mol_type = other RNA
  modified_base 1: mod_base = OTHER; note = 2'-O-methyl-uridine-3'-phosphorothioate
  modified_base 2: mod_base = OTHER; note = 2'-deoxy-2'-fluoro-uridine-3'-phosphorothioate
  modified_base 3: mod_base = OTHER; note = 2'-O-methyl-cytidine-3'-phosphate
  modified_base 4: mod_base = OTHER; note = 2'-O-methyl-adenosine-3'-phosphate
  modified_base 5: mod_base = OTHER; note = 2'-O-methyl-cytidine-3'-phosphate
  modified_base 6: mod_base = OTHER; note = 2'-deoxy-2'-fluoro-guanosine-3'-phosphate
  modified_base 7: mod_base = OTHER; note = 2'-O-methyl-adenosine-3'-phosphate
  modified_base 8: mod_base = OTHER; note = 2'-deoxy-2'-fluoro-uridine-3'-phosphate
  modified_base 9: mod_base = OTHER; note = 2'-deoxy-2'-fluoro-guanosine-3'-phosphate
  modified_base 10: mod_base = OTHER; note = 2'-O-methyl-adenosine-3'-phosphate
  modified_base 11: mod_base = OTHER; note = 2'-O-methyl-uridine-3'-phosphate
  modified_base 12: mod_base = OTHER; note = 2'-O-methyl-adenosine-3'-phosphate
  modified_base 13: mod_base = OTHER; note = 2'-O-methyl-cytidine-3'-phosphate
  modified_base 14: mod_base = OTHER; note = 2'-deoxy-2'-fluoro-adenosine-3'-phosphate
  modified_base 15: mod_base = OTHER; note = 2'-O-methyl-guanosine-3'-phosphate
  modified_base 16: mod_base = OTHER; note = 2'-deoxy-2'-fluoro-adenosine-3'-phosphate
  modified_base 17: mod_base = OTHER; note = 2'-O-methyl-uridine-3'-phosphate
  modified_base 18: mod_base = OTHER; note = 2'-O-methyl-cytidine-3'-phosphate
  modified_base 19: mod_base = OTHER; note = 2'-O-methyl-adenosine-3'-phosphorothioate
  modified_base 20: mod_base = OTHER; note = 2'-O-methyl-uridine-3'-phosphorothioate
  modified_base 21: mod_base = OTHER; note = 2'-O-methyl-uridine-3'-phosphate
ttcacgatgatacagatcatt

SEQ ID NO: 2013 - RNA, 21 nt, synthetic construct
  source 1..21: mol_type = other RNA
  modified_base 1: mod_base = OTHER; note = 2'-O-methyl-uridine-3'-phosphorothioate
  modified_base 2: mod_base = OTHER; note = 2'-deoxy-2'-fluoro-adenosine-3'-phosphorothioate
  modified_base 3: mod_base = OTHER; note = 2'-O-methyl-uridine-3'-phosphate
  modified_base 4: mod_base = OTHER; note = 2'-O-methyl-cytidine-3'-phosphate
  modified_base 5: mod_base = OTHER; note = 2'-O-methyl-adenosine-3'-phosphate
  modified_base 6: mod_base = OTHER; note = 2'-deoxy-2'-fluoro-cytidine-3'-phosphate
  modified_base 7: mod_base = OTHER; note = 2'-O-methyl-guanosine-3'-phosphate
  modified_base 8: mod_base = OTHER; note = 2'-deoxy-2'-fluoro-adenosine-3'-phosphate
  modified_base 9: mod_base = OTHER; note = 2'-deoxy-2'-fluoro-uridine-3'-phosphate
  modified_base 10: mod_base = OTHER; note = 2'-O-methyl-guanosine-3'-phosphate
  modified_base 11: mod_base = OTHER; note = 2'-O-methyl-adenosine-3'-phosphate
  modified_base 12: mod_base = OTHER; note = 2'-O-methyl-uridine-3'-phosphate
  modified_base 13: mod_base = OTHER; note = 2'-O-methyl-adenosine-3'-phosphate
  modified_base 14: mod_base = OTHER; note = 2'-deoxy-2'-fluoro-cytidine-3'-phosphate
  modified_base 15: mod_base = OTHER; note = 2'-O-methyl-adenosine-3'-phosphate
  modified_base 16: mod_base = OTHER; note = 2'-deoxy-2'-fluoro-guanosine-3'-phosphate
  modified_base 17: mod_base = OTHER; note = 2'-O-methyl-adenosine-3'-phosphate
  modified_base 18: mod_base = OTHER; note = 2'-O-methyl-uridine-3'-phosphate
  modified_base 19: mod_base = OTHER; note = 2'-O-methyl-cytidine-3'-phosphorothioate
  modified_base 20: mod_base = OTHER; note = 2'-O-methyl-uridine-3'-phosphorothioate
  modified_base 21: mod_base = OTHER; note = 2'-O-methyl-uridine-3'-phosphate
tatcacgatgatacagatctt

SEQ ID NO: 2014 - RNA, 21 nt, synthetic construct
  source 1..21: mol_type = other RNA
  modified_base 1: mod_base = OTHER; note = 2'-O-methyl-uridine-3'-phosphorothioate
  modified_base 2: mod_base = OTHER; note = 2'-deoxy-2'-fluoro-cytidine-3'-phosphorothioate
  modified_base 3: mod_base = OTHER; note = 2'-O-methyl-adenosine-3'-phosphate
  modified_base 4: mod_base = OTHER; note = 2'-O-methyl-uridine-3'-phosphate
  modified_base 5: mod_base = OTHER; note = 2'-O-methyl-cytidine-3'-phosphate
  modified_base 6: mod_base = OTHER; note = 2'-deoxy-2'-fluoro-adenosine-3'-phosphate
  modified_base 7: mod_base = OTHER; note = 2'-O-methyl-cytidine-3'-phosphate
  modified_base 8: mod_base = OTHER; note = 2'-deoxy-2'-fluoro-guanosine-3'-phosphate
  modified_base 9: mod_base = OTHER; note = 2'-deoxy-2'-fluoro-adenosine-3'-phosphate
  modified_base 10: mod_base = OTHER; note = 2'-O-methyl-uridine-3'-phosphate
  modified_base 11: mod_base = OTHER; note = 2'-O-methyl-guanosine-3'-phosphate
  modified_base 12: mod_base = OTHER; note = 2'-O-methyl-adenosine-3'-phosphate
  modified_base 13: mod_base = OTHER; note = 2'-O-methyl-uridine-3'-phosphate
  modified_base 14: mod_base = OTHER; note = 2'-deoxy-2'-fluoro-adenosine-3'-phosphate
  modified_base 15: mod_base = OTHER; note = 2'-O-methyl-cytidine-3'-phosphate
  modified_base 16: mod_base = OTHER; note = 2'-deoxy-2'-fluoro-adenosine-3'-phosphate
  modified_base 17: mod_base = OTHER; note = 2'-O-methyl-guanosine-3'-phosphate
  modified_base 18: mod_base = OTHER; note = 2'-O-methyl-adenosine-3'-phosphate
  modified_base 19: mod_base = OTHER; note = 2'-O-methyl-uridine-3'-phosphorothioate
  modified_base 20: mod_base = OTHER; note = 2'-O-methyl-uridine-3'-phosphorothioate
  modified_base 21: mod_base = OTHER; note = 2'-O-methyl-uridine-3'-phosphate
tcatcacgatgatacagattt

SEQ ID NO: 2015 - RNA, 21 nt, synthetic construct
  source 1..21: mol_type = other RNA
  modified_base 1: mod_base = OTHER; note = 2'-O-methyl-uridine-3'-phosphorothioate
  modified_base 2: mod_base = OTHER; note = 2'-deoxy-2'-fluoro-guanosine-3'-phosphorothioate
  modified_base 3: mod_base = OTHER; note = 2'-O-methyl-cytidine-3'-phosphate
  modified_base 4: mod_base = OTHER; note = 2'-O-methyl-adenosine-3'-phosphate
  modified_base 5: mod_base = OTHER; note = 2'-O-methyl-uridine-3'-phosphate
  modified_base 6: mod_base = OTHER; note = 2'-deoxy-2'-fluoro-cytidine-3'-phosphate
  modified_base 7: mod_base = OTHER; note = 2'-O-methyl-adenosine-3'-phosphate
  modified_base 8: mod_base = OTHER; note = 2'-deoxy-2'-fluoro-cytidine-3'-phosphate
  modified_base 9: mod_base = OTHER; note = 2'-deoxy-2'-fluoro-guanosine-3'-phosphate
  modified_base 10: mod_base = OTHER; note = 2'-O-methyl-adenosine-3'-phosphate
  modified_base 11: mod_base = OTHER; note = 2'-O-methyl-uridine-3'-phosphate
  modified_base 12: mod_base = OTHER; note = 2'-O-methyl-guanosine-3'-phosphate
  modified_base 13: mod_base = OTHER; note = 2'-O-methyl-adenosine-3'-phosphate
  modified_base 14: mod_base = OTHER; note = 2'-deoxy-2'-fluoro-uridine-3'-phosphate
  modified_base 15: mod_base = OTHER; note = 2'-O-methyl-adenosine-3'-phosphate
  modified_base 16: mod_base = OTHER; note = 2'-deoxy-2'-fluoro-cytidine-3'-phosphate
  modified_base 17: mod_base = OTHER; note = 2'-O-methyl-adenosine-3'-phosphate
  modified_base 18: mod_base = OTHER; note = 2'-O-methyl-guanosine-3'-phosphate
  modified_base 19: mod_base = OTHER; note = 2'-O-methyl-adenosine-3'-phosphorothioate
  modified_base 20: mod_base = OTHER; note = 2'-O-methyl-uridine-3'-phosphorothioate
  modified_base 21: mod_base = OTHER; note = 2'-O-methyl-uridine-3'-phosphate
tgcatcacgatgatacagatt

SEQ ID NO: 2016 - RNA, 21 nt, synthetic construct
  source 1..21: mol_type = other RNA
  modified_base 1: mod_base = OTHER; note = 2'-O-methyl-uridine-3'-phosphorothioate
  modified_base 2: mod_base = OTHER; note = 2'-deoxy-2'-fluoro-guanosine-3'-phosphorothioate
  modified_base 3: mod_base = OTHER; note = 2'-O-methyl-adenosine-3'-phosphate
  modified_base 4: mod_base = OTHER; note = 2'-O-methyl-adenosine-3'-phosphate
  modified_base 5: mod_base = OTHER; note = 2'-O-methyl-guanosine-3'-phosphate
  modified_base 6: mod_base = OTHER; note = 2'-deoxy-2'-fluoro-cytidine-3'-phosphate
  modified_base 7: mod_base = OTHER; note = 2'-O-methyl-adenosine-3'-phosphate
  modified_base 8: mod_base = OTHER; note = 2'-deoxy-2'-fluoro-uridine-3'-phosphate
  modified_base 9: mod_base = OTHER; note = 2'-deoxy-2'-fluoro-cytidine-3'-phosphate
  modified_base 10: mod_base = OTHER; note = 2'-O-methyl-adenosine-3'-phosphate
  modified_base 11: mod_base = OTHER; note = 2'-O-methyl-cytidine-3'-phosphate
  modified_base 12: mod_base = OTHER; note = 2'-O-methyl-guanosine-3'-phosphate
  modified_base 13: mod_base = OTHER; note = 2'-O-methyl-adenosine-3'-phosphate
  modified_base 14: mod_base = OTHER; note = 2'-deoxy-2'-fluoro-uridine-3'-phosphate
  modified_base 15: mod_base = OTHER; note = 2'-O-methyl-guanosine-3'-phosphate
  modified_base 16: mod_base = OTHER; note = 2'-deoxy-2'-fluoro-adenosine-3'-phosphate
  modified_base 17: mod_base = OTHER; note = 2'-O-methyl-uridine-3'-phosphate
  modified_base 18: mod_base = OTHER; note = 2'-O-methyl-adenosine-3'-phosphate
  modified_base 19: mod_base = OTHER; note = 2'-O-methyl-cytidine-3'-phosphorothioate
  modified_base 20: mod_base = OTHER; note = 2'-O-methyl-uridine-3'-phosphorothioate
  modified_base 21: mod_base = OTHER; note = 2'-O-methyl-uridine-3'-phosphate
tgaagcatcacgatgatactt

SEQ ID NO: 2017 - RNA, 21 nt, synthetic construct
  source 1..21: mol_type = other RNA
  modified_base 1: mod_base = OTHER; note = 2'-O-methyl-uridine-3'-phosphorothioate
  modified_base 2: mod_base = OTHER; note = 2'-deoxy-2'-fluoro-adenosine-3'-phosphorothioate
  modified_base 3: mod_base = OTHER; note = 2'-O-methyl-guanosine-3'-phosphate
  modified_base 4: mod_base = OTHER; note = 2'-O-methyl-adenosine-3'-phosphate
  modified_base 5: mod_base = OTHER; note = 2'-O-methyl-guanosine-3'-phosphate
  modified_base 6: mod_base = OTHER; note = 2'-deoxy-2'-fluoro-adenosine-3'-phosphate
  modified_base 7: mod_base = OTHER; note = 2'-O-methyl-adenosine-3'-phosphate
  modified_base 8: mod_base = OTHER; note = 2'-deoxy-2'-fluoro-guanosine-3'-phosphate
  modified_base 9: mod_base = OTHER; note = 2'-deoxy-2'-fluoro-cytidine-3'-phosphate
  modified_base 10: mod_base = OTHER; note = 2'-O-methyl-adenosine-3'-phosphate
  modified_base 11: mod_base = OTHER; note = 2'-O-methyl-uridine-3'-phosphate
  modified_base 12: mod_base = OTHER; note = 2'-O-methyl-cytidine-3'-phosphate
  modified_base 13: mod_base = OTHER; note = 2'-O-methyl-adenosine-3'-phosphate
  modified_base 14: mod_base = OTHER; note = 2'-deoxy-2'-fluoro-cytidine-3'-phosphate
  modified_base 15: mod_base = OTHER; note = 2'-O-methyl-guanosine-3'-phosphate
  modified_base 16: mod_base = OTHER; note = 2'-deoxy-2'-fluoro-adenosine-3'-phosphate
  modified_base 17: mod_base = OTHER; note = 2'-O-methyl-uridine-3'-phosphate
  modified_base 18: mod_base = OTHER; note = 2'-O-methyl-guanosine-3'-phosphate
  modified_base 19: mod_base = OTHER; note = 2'-O-methyl-adenosine-3'-phosphorothioate
  modified_base 20: mod_base = OTHER; note = 2'-O-methyl-uridine-3'-phosphorothioate
  modified_base 21: mod_base = OTHER; note = 2'-O-methyl-uridine-3'-phosphate
tagagaagcatcacgatgatt

SEQ ID NO: 2018 - RNA, 21 nt, synthetic construct
  source 1..21: mol_type = other RNA
  modified_base 1: mod_base = OTHER; note = 2'-O-methyl-uridine-3'-phosphorothioate
  modified_base 2: mod_base = OTHER; note = 2'-deoxy-2'-fluoro-cytidine-3'-phosphorothioate
  modified_base 3: mod_base = OTHER; note = 2'-O-methyl-adenosine-3'-phosphate
  modified_base 4: mod_base = OTHER; note = 2'-O-methyl-guanosine-3'-phosphate
  modified_base 5: mod_base = OTHER; note = 2'-O-methyl-adenosine-3'-phosphate
  modified_base 6: mod_base = OTHER; note = 2'-deoxy-2'-fluoro-guanosine-3'-phosphate
  modified_base 7: mod_base = OTHER; note = 2'-O-methyl-adenosine-3'-phosphate
  modified_base 8: mod_base = OTHER; note = 2'-deoxy-2'-fluoro-adenosine-3'-phosphate
  modified_base 9: mod_base = OTHER; note = 2'-deoxy-2'-fluoro-guanosine-3'-phosphate
  modified_base 10: mod_base = OTHER; note = 2'-O-methyl-cytidine-3'-phosphate
  modified_base 11: mod_base = OTHER; note = 2'-O-methyl-adenosine-3'-phosphate
  modified_base 12: mod_base = OTHER; note = 2'-O-methyl-uridine-3'-phosphate
  modified_base 13: mod_base = OTHER; note = 2'-O-methyl-cytidine-3'-phosphate
  modified_base 14: mod_base = OTHER; note = 2'-deoxy-2'-fluoro-adenosine-3'-phosphate
  modified_base 15: mod_base = OTHER; note = 2'-O-methyl-cytidine-3'-phosphate
  modified_base 16: mod_base = OTHER; note = 2'-deoxy-2'-fluoro-guanosine-3'-phosphate
  modified_base 17: mod_base = OTHER; note = 2'-O-methyl-adenosine-3'-phosphate
  modified_base 18: mod_base = OTHER; note = 2'-O-methyl-uridine-3'-phosphate
  modified_base 19: mod_base = OTHER; note = 2'-O-methyl-guanosine-3'-phosphorothioate
  modified_base 20: mod_base = OTHER; note = 2'-O-methyl-uridine-3'-phosphorothioate
  modified_base 21: mod_base = OTHER; note = 2'-O-methyl-uridine-3'-phosphate
tcagagaagcatcacgatgtt

SEQ ID NO: 2019 - RNA, 21 nt, synthetic construct
  source 1..21: mol_type = other RNA
  modified_base 1: mod_base = OTHER; note = 2'-O-methyl-uridine-3'-phosphorothioate
  modified_base 2: mod_base = OTHER; note = 2'-deoxy-2'-fluoro-uridine-3'-phosphorothioate
  modified_base 3: mod_base = OTHER; note = 2'-O-methyl-cytidine-3'-phosphate
  modified_base 4: mod_base = OTHER; note = 2'-O-methyl-adenosine-3'-phosphate
  modified_base 5: mod_base = OTHER; note = 2'-O-methyl-guanosine-3'-phosphate
  modified_base 6: mod_base = OTHER; note = 2'-deoxy-2'-fluoro-adenosine-3'-phosphate
  modified_base 7: mod_base = OTHER; note = 2'-O-methyl-guanosine-3'-phosphate
  modified_base 8: mod_base = OTHER; note = 2'-deoxy-2'-fluoro-adenosine-3'-phosphate
  modified_base 9: mod_base = OTHER; note = 2'-deoxy-2'-fluoro-adenosine-3'-phosphate
  modified_base 10: mod_base = OTHER; note = 2'-O-methyl-guanosine-3'-phosphate
  modified_base 11: mod_base = OTHER; note = 2'-O-methyl-cytidine-3'-phosphate
  modified_base 12: mod_base = OTHER; note = 2'-O-methyl-adenosine-3'-phosphate
  modified_base 13: mod_base = OTHER; note = 2'-O-methyl-uridine-3'-phosphate
  modified_base 14: mod_base = OTHER; note = 2'-deoxy-2'-fluoro-cytidine-3'-phosphate
  modified_base 15: mod_base = OTHER; note = 2'-O-methyl-adenosine-3'-phosphate
  modified_base 16: mod_base = OTHER; note = 2'-deoxy-2'-fluoro-cytidine-3'-phosphate
  modified_base 17: mod_base = OTHER; note = 2'-O-methyl-guanosine-3'-phosphate
  modified_base 18: mod_base = OTHER; note = 2'-O-methyl-adenosine-3'-phosphate
  modified_base 19: mod_base = OTHER; note = 2'-O-methyl-uridine-3'-phosphorothioate
  modified_base 20: mod_base = OTHER; note = 2'-O-methyl-uridine-3'-phosphorothioate
  modified_base 21: mod_base = OTHER; note = 2'-O-methyl-uridine-3'-phosphate
ttcagagaagcatcacgattt

SEQ ID NO: 2020 - RNA, 21 nt, synthetic construct
  source 1..21: mol_type = other RNA
  modified_base 1: mod_base = OTHER; note = 2'-O-methyl-uridine-3'-phosphorothioate
  modified_base 2: mod_base = OTHER; note = 2'-deoxy-2'-fluoro-uridine-3'-phosphorothioate
  modified_base 3: mod_base = OTHER; note = 2'-O-methyl-uridine-3'-phosphate
  modified_base 4: mod_base = OTHER; note = 2'-O-methyl-cytidine-3'-phosphate
  modified_base 5: mod_base = OTHER; note = 2'-O-methyl-adenosine-3'-phosphate
  modified_base 6: mod_base = OTHER; note = 2'-deoxy-2'-fluoro-guanosine-3'-phosphate
  modified_base 7: mod_base = OTHER; note = 2'-O-methyl-adenosine-3'-phosphate
  modified_base 8: mod_base = OTHER; note = 2'-deoxy-2'-fluoro-guanosine-3'-phosphate
  modified_base 9: mod_base = OTHER; note = 2'-deoxy-2'-fluoro-adenosine-3'-phosphate
  modified_base 10: mod_base = OTHER; note = 2'-O-methyl-adenosine-3'-phosphate
  modified_base 11: mod_base = OTHER; note = 2'-O-methyl-guanosine-3'-phosphate
  modified_base 12: mod_base = OTHER; note = 2'-O-methyl-cytidine-3'-phosphate
  modified_base 13: mod_base = OTHER; note = 2'-O-methyl-adenosine-3'-phosphate
  modified_base 14: mod_base = OTHER; note = 2'-deoxy-2'-fluoro-uridine-3'-phosphate
  modified_base 15: mod_base = OTHER; note = 2'-O-methyl-cytidine-3'-phosphate
  modified_base 16: mod_base = OTHER; note = 2'-deoxy-2'-fluoro-adenosine-3'-phosphate
  modified_base 17: mod_base = OTHER; note = 2'-O-methyl-cytidine-3'-phosphate
  modified_base 18: mod_base = OTHER; note = 2'-O-methyl-guanosine-3'-phosphate
  modified_base 19: mod_base = OTHER; note = 2'-O-methyl-adenosine-3'-phosphorothioate
  modified_base 20: mod_base = OTHER; note = 2'-O-methyl-uridine-3'-phosphorothioate
  modified_base 21: mod_base = OTHER; note = 2'-O-methyl-uridine-3'-phosphate
tttcagagaagcatcacgatt

SEQ ID NO: 2021 - RNA, 21 nt, synthetic construct
  source 1..21: mol_type = other RNA
  modified_base 1: mod_base = OTHER; note = 2'-O-methyl-uridine-3'-phosphorothioate
  modified_base 2: mod_base = OTHER; note = 2'-deoxy-2'-fluoro-cytidine-3'-phosphorothioate
  modified_base 3: mod_base = OTHER; note = 2'-O-methyl-uridine-3'-phosphate
  modified_base 4: mod_base = OTHER; note = 2'-O-methyl-uridine-3'-phosphate
  modified_base 5: mod_base = OTHER; note = 2'-O-methyl-cytidine-3'-phosphate
  modified_base 6: mod_base = OTHER; note = 2'-deoxy-2'-fluoro-adenosine-3'-phosphate
  modified_base 7: mod_base = OTHER; note = 2'-O-methyl-guanosine-3'-phosphate
  modified_base 8: mod_base = OTHER; note = 2'-deoxy-2'-fluoro-adenosine-3'-phosphate
  modified_base 9: mod_base = OTHER; note = 2'-deoxy-2'-fluoro-guanosine-3'-phosphate
  modified_base 10: mod_base = OTHER; note = 2'-O-methyl-adenosine-3'-phosphate
  modified_base 11: mod_base = OTHER; note = 2'-O-methyl-adenosine-3'-phosphate
  modified_base 12: mod_base = OTHER; note = 2'-O-methyl-guanosine-3'-phosphate
  modified_base 13: mod_base = OTHER; note = 2'-O-methyl-cytidine-3'-phosphate
  modified_base 14: mod_base = OTHER; note = 2'-deoxy-2'-fluoro-adenosine-3'-phosphate
  modified_base 15: mod_base = OTHER; note = 2'-O-methyl-uridine-3'-phosphate
  modified_base 16: mod_base = OTHER; note = 2'-deoxy-2'-fluoro-cytidine-3'-phosphate
  modified_base 17: mod_base = OTHER; note = 2'-O-methyl-adenosine-3'-phosphate
  modified_base 18: mod_base = OTHER; note = 2'-O-methyl-cytidine-3'-phosphate
  modified_base 19: mod_base = OTHER; note = 2'-O-methyl-guanosine-3'-phosphorothioate
  modified_base 20: mod_base = OTHER; note = 2'-O-methyl-uridine-3'-phosphorothioate
  modified_base 21: mod_base = OTHER; note = 2'-O-methyl-uridine-3'-phosphate
tcttcagagaagcatcacgtt

SEQ ID NO: 2022 - RNA, 21 nt, synthetic construct
  source 1..21: mol_type = other RNA
  modified_base 1: mod_base = OTHER; note = 2'-O-methyl-uridine-3'-phosphorothioate
  modified_base 2: mod_base = OTHER; note = 2'-deoxy-2'-fluoro-uridine-3'-phosphorothioate
  modified_base 3: mod_base = OTHER; note = 2'-O-methyl-uridine-3'-phosphate
  modified_base 4: mod_base = OTHER; note = 2'-O-methyl-guanosine-3'-phosphate
  modified_base 5: mod_base = OTHER; note = 2'-O-methyl-uridine-3'-phosphate
  modified_base 6: mod_base = OTHER; note = 2'-deoxy-2'-fluoro-adenosine-3'-phosphate
  modified_base 7: mod_base = OTHER; note = 2'-O-methyl-guanosine-3'-phosphate
  modified_base 8: mod_base = OTHER; note = 2'-deoxy-2'-fluoro-cytidine-3'-phosphate
  modified_base 9: mod_base = OTHER; note = 2'-deoxy-2'-fluoro-adenosine-3'-phosphate
  modified_base 10: mod_base = OTHER; note = 2'-O-methyl-guanosine-3'-phosphate
  modified_base 11: mod_base = OTHER; note = 2'-O-methyl-adenosine-3'-phosphate
  modified_base 12: mod_base = OTHER; note = 2'-O-methyl-adenosine-3'-phosphate
  modified_base 13: mod_base = OTHER; note = 2'-O-methyl-cytidine-3'-phosphate
  modified_base 14: mod_base = OTHER; note = 2'-deoxy-2'-fluoro-uridine-3'-phosphate
  modified_base 15: mod_base = OTHER; note = 2'-O-methyl-uridine-3'-phosphate
  modified_base 16: mod_base = OTHER; note = 2'-deoxy-2'-fluoro-cytidine-3'-phosphate
  modified_base 17: mod_base = OTHER; note = 2'-O-methyl-adenosine-3'-phosphate
  modified_base 18: mod_base = OTHER; note = 2'-O-methyl-guanosine-3'-phosphate
  modified_base 19: mod_base = OTHER; note = 2'-O-methyl-adenosine-3'-phosphorothioate
  modified_base 20: mod_base = OTHER; note = 2'-O-methyl-uridine-3'-phosphorothioate
  modified_base 21: mod_base = OTHER; note = 2'-O-methyl-uridine-3'-phosphate
tttgtagcagaacttcagatt

SEQ ID NO: 2023 - RNA, 21 nt, synthetic construct
  source 1..21: mol_type = other RNA
  modified_base 1: mod_base = OTHER; note = 2'-O-methyl-uridine-3'-phosphorothioate
  modified_base 2: mod_base = OTHER; note = 2'-deoxy-2'-fluoro-guanosine-3'-phosphorothioate
  modified_base 3: mod_base = OTHER; note = 2'-O-methyl-uridine-3'-phosphate
  modified_base 4: mod_base = OTHER; note = 2'-O-methyl-uridine-3'-phosphate
  modified_base 5: mod_base = OTHER; note = 2'-O-methyl-guanosine-3'-phosphate
  modified_base 6: mod_base = OTHER; note = 2'-deoxy-2'-fluoro-uridine-3'-phosphate
  modified_base 7: mod_base = OTHER; note = 2'-O-methyl-adenosine-3'-phosphate
  modified_base 8: mod_base = OTHER; note = 2'-deoxy-2'-fluoro-guanosine-3'-phosphate
  modified_base 9: mod_base = OTHER; note = 2'-deoxy-2'-fluoro-cytidine-3'-phosphate
  modified_base 10: mod_base = OTHER; note = 2'-O-methyl-adenosine-3'-phosphate
  modified_base 11: mod_base = OTHER; note = 2'-O-methyl-guanosine-3'-phosphate
  modified_base 12: mod_base = OTHER; note = 2'-O-methyl-adenosine-3'-phosphate
  modified_base 13: mod_base = OTHER; note = 2'-O-methyl-adenosine-3'-phosphate
  modified_base 14: mod_base = OTHER; note = 2'-deoxy-2'-fluoro-cytidine-3'-phosphate
  modified_base 15: mod_base = OTHER; note = 2'-O-methyl-uridine-3'-phosphate
  modified_base 16: mod_base = OTHER; note = 2'-deoxy-2'-fluoro-uridine-3'-phosphate
  modified_base 17: mod_base = OTHER; note = 2'-O-methyl-cytidine-3'-phosphate
  modified_base 18: mod_base = OTHER; note = 2'-O-methyl-adenosine-3'-phosphate
  modified_base 19: mod_base = OTHER; note = 2'-O-methyl-guanosine-3'-phosphorothioate
  modified_base 20: mod_base = OTHER; note = 2'-O-methyl-uridine-3'-phosphorothioate
  modified_base 21: mod_base = OTHER; note = 2'-O-methyl-uridine-3'-phosphate
tgttgtagcagaacttcagtt

SEQ ID NO: 2024 - RNA, 21 nt, synthetic construct
  source 1..21: mol_type = other RNA
  modified_base 1: mod_base = OTHER; note = 2'-O-methyl-uridine-3'-phosphorothioate
  modified_base 2: mod_base = OTHER; note = 2'-deoxy-2'-fluoro-guanosine-3'-phosphorothioate
  modified_base 3: mod_base = OTHER; note = 2'-O-methyl-guanosine-3'-phosphate
  modified_base 4: mod_base = OTHER; note = 2'-O-methyl-uridine-3'-phosphate
  modified_base 5: mod_base = OTHER; note = 2'-O-methyl-uridine-3'-phosphate
  modified_base 6: mod_base = OTHER; note = 2'-deoxy-2'-fluoro-guanosine-3'-phosphate
  modified_base 7: mod_base = OTHER; note = 2'-O-methyl-uridine-3'-phosphate
  modified_base 8: mod_base = OTHER; note = 2'-deoxy-2'-fluoro-adenosine-3'-phosphate
  modified_base 9: mod_base = OTHER; note = 2'-deoxy-2'-fluoro-guanosine-3'-phosphate
  modified_base 10: mod_base = OTHER; note = 2'-O-methyl-cytidine-3'-phosphate
  modified_base 11: mod_base = OTHER; note = 2'-O-methyl-adenosine-3'-phosphate
  modified_base 12: mod_base = OTHER; note = 2'-O-methyl-guanosine-3'-phosphate
  modified_base 13: mod_base = OTHER; note = 2'-O-methyl-adenosine-3'-phosphate
  modified_base 14: mod_base = OTHER; note = 2'-deoxy-2'-fluoro-adenosine-3'-phosphate
  modified_base 15: mod_base = OTHER; note = 2'-O-methyl-cytidine-3'-phosphate
  modified_base 16: mod_base = OTHER; note = 2'-deoxy-2'-fluoro-uridine-3'-phosphate
  modified_base 17: mod_base = OTHER; note = 2'-O-methyl-uridine-3'-phosphate
  modified_base 18: mod_base = OTHER; note = 2'-O-methyl-cytidine-3'-phosphate
  modified_base 19: mod_base = OTHER; note = 2'-O-methyl-adenosine-3'-phosphorothioate
  modified_base 20: mod_base = OTHER; note = 2'-O-methyl-uridine-3'-phosphorothioate
  modified_base 21: mod_base = OTHER; note = 2'-O-methyl-uridine-3'-phosphate
tggttgtagcagaacttcatt

SEQ ID NO: 2025 - RNA, 21 nt, synthetic construct
  source 1..21: mol_type = other RNA
  modified_base 1: mod_base = OTHER; note = 2'-O-methyl-uridine-3'-phosphorothioate
  modified_base 2: mod_base = OTHER; note = 2'-deoxy-2'-fluoro-cytidine-3'-phosphorothioate
  modified_base 3: mod_base = OTHER; note = 2'-O-methyl-uridine-3'-phosphate
  modified_base 4: mod_base = OTHER; note = 2'-O-methyl-adenosine-3'-phosphate
  modified_base 5: mod_base = OTHER; note = 2'-O-methyl-guanosine-3'-phosphate
  modified_base 6: mod_base = OTHER; note = 2'-deoxy-2'-fluoro-adenosine-3'-phosphate
  modified_base 7: mod_base = OTHER; note = 2'-O-methyl-guanosine-3'-phosphate
  modified_base 8: mod_base = OTHER; note = 2'-deoxy-2'-fluoro-guanosine-3'-phosphate
  modified_base 9: mod_base = OTHER; note = 2'-deoxy-2'-fluoro-uridine-3'-phosphate
  modified_base 10: mod_base = OTHER; note = 2'-O-methyl-uridine-3'-phosphate
  modified_base 11: mod_base = OTHER; note = 2'-O-methyl-guanosine-3'-phosphate
  modified_base 12: mod_base = OTHER; note = 2'-O-methyl-uridine-3'-phosphate
  modified_base 13: mod_base = OTHER; note = 2'-O-methyl-adenosine-3'-phosphate
  modified_base 14: mod_base = OTHER; note = 2'-deoxy-2'-fluoro-guanosine-3'-phosphate
  modified_base 15: mod_base = OTHER; note = 2'-O-methyl-cytidine-3'-phosphate
  modified_base 16: mod_base = OTHER; note = 2'-deoxy-2'-fluoro-adenosine-3'-phosphate
  modified_base 17: mod_base = OTHER; note = 2'-O-methyl-guanosine-3'-phosphate
  modified_base 18: mod_base = OTHER; note = 2'-O-methyl-adenosine-3'-phosphate
  modified_base 19: mod_base = OTHER; note = 2'-O-methyl-adenosine-3'-phosphorothioate
  modified_base 20: mod_base = OTHER; note = 2'-O-methyl-uridine-3'-phosphorothioate
  modified_base 21: mod_base = OTHER; note = 2'-O-methyl-uridine-3'-phosphate
tctagaggttgtagcagaatt

SEQ ID NO: 2026 - RNA, 21 nt, synthetic construct
  source 1..21: mol_type = other RNA
  modified_base 1: mod_base = OTHER; note = 2'-O-methyl-uridine-3'-phosphorothioate
  modified_base 2: mod_base = OTHER; note = 2'-deoxy-2'-fluoro-adenosine-3'-phosphorothioate
  modified_base 3: mod_base = OTHER; note = 2'-O-methyl-guanosine-3'-phosphate
  modified_base 4: mod_base = OTHER; note = 2'-O-methyl-adenosine-3'-phosphate
  modified_base 5: mod_base = OTHER; note = 2'-O-methyl-uridine-3'-phosphate
  modified_base 6: mod_base = OTHER; note = 2'-deoxy-2'-fluoro-cytidine-3'-phosphate
  modified_base 7: mod_base = OTHER; note = 2'-O-methyl-uridine-3'-phosphate
  modified_base 8: mod_base = OTHER; note = 2'-deoxy-2'-fluoro-adenosine-3'-phosphate
  modified_base 9: mod_base = OTHER; note = 2'-deoxy-2'-fluoro-guanosine-3'-phosphate
  modified_base 10: mod_base = OTHER; note = 2'-O-methyl-adenosine-3'-phosphate
  modified_base 11: mod_base = OTHER; note = 2'-O-methyl-guanosine-3'-phosphate
  modified_base 12: mod_base = OTHER; note = 2'-O-methyl-guanosine-3'-phosphate
  modified_base 13: mod_base = OTHER; note = 2'-O-methyl-uridine-3'-phosphate
  modified_base 14: mod_base = OTHER; note = 2'-deoxy-2'-fluoro-uridine-3'-phosphate
  modified_base 15: mod_base = OTHER; note = 2'-O-methyl-guanosine-3'-phosphate
  modified_base 16: mod_base = OTHER; note = 2'-deoxy-2'-fluoro-uridine-3'-phosphate
  modified_base 17: mod_base = OTHER; note = 2'-O-methyl-adenosine-3'-phosphate
  modified_base 18: mod_base = OTHER; note = 2'-O-methyl-guanosine-3'-phosphate
  modified_base 19: mod_base = OTHER; note = 2'-O-methyl-cytidine-3'-phosphorothioate
  modified_base 20: mod_base = OTHER; note = 2'-O-methyl-uridine-3'-phosphorothioate
  modified_base 21: mod_base = OTHER; note = 2'-O-methyl-uridine-3'-phosphate
tagatctagaggttgtagctt

SEQ ID NO: 2027 - RNA, 21 nt, synthetic construct
  source 1..21: mol_type = other RNA
  modified_base 1: mod_base = OTHER; note = 2'-O-methyl-uridine-3'-phosphorothioate
  modified_base 2: mod_base = OTHER; note = 2'-deoxy-2'-fluoro-guanosine-3'-phosphorothioate
  modified_base 3: mod_base = OTHER; note = 2'-O-methyl-cytidine-3'-phosphate
  modified_base 4: mod_base = OTHER; note = 2'-O-methyl-adenosine-3'-phosphate
  modified_base 5: mod_base = OTHER; note = 2'-O-methyl-uridine-3'-phosphate
  modified_base 6: mod_base = OTHER; note = 2'-deoxy-2'-fluoro-guanosine-3'-phosphate
  modified_base 7: mod_base = OTHER; note = 2'-O-methyl-guanosine-3'-phosphate
  modified_base 8: mod_base = OTHER; note = 2'-deoxy-2'-fluoro-guanosine-3'-phosphate
  modified_base 9: mod_base = OTHER; note = 2'-deoxy-2'-fluoro-adenosine-3'-phosphate
  modified_base 10: mod_base = OTHER; note = 2'-O-methyl-uridine-3'-phosphate
  modified_base 11: mod_base = OTHER; note = 2'-O-methyl-guanosine-3'-phosphate
  modified_base 12: mod_base = OTHER; note = 2'-O-methyl-adenosine-3'-phosphate
  modified_base 13: mod_base = OTHER; note = 2'-O-methyl-cytidine-3'-phosphate
  modified_base 14: mod_base = OTHER; note = 2'-deoxy-2'-fluoro-adenosine-3'-phosphate
  modified_base 15: mod_base = OTHER; note = 2'-O-methyl-guanosine-3'-phosphate
  modified_base 16: mod_base = OTHER; note = 2'-deoxy-2'-fluoro-adenosine-3'-phosphate
  modified_base 17: mod_base = OTHER; note = 2'-O-methyl-uridine-3'-phosphate
  modified_base 18: mod_base = OTHER; note = 2'-O-methyl-uridine-3'-phosphate
  modified_base 19: mod_base = OTHER; note = 2'-O-methyl-uridine-3'-phosphorothioate
  modified_base 20: mod_base = OTHER; note = 2'-O-methyl-uridine-3'-phosphorothioate
  modified_base 21: mod_base = OTHER; note = 2'-O-methyl-uridine-3'-phosphate
tgcatgggatgacagattttt

SEQ ID NO: 2028 - RNA, 21 nt, synthetic construct
  source 1..21: mol_type = other RNA
  modified_base 1: mod_base = OTHER; note = 2'-O-methyl-uridine-3'-phosphorothioate
  modified_base 2: mod_base = OTHER; note = 2'-deoxy-2'-fluoro-uridine-3'-phosphorothioate
  modified_base 3: mod_base = OTHER; note = 2'-O-methyl-guanosine-3'-phosphate
  modified_base 4: mod_base = OTHER; note = 2'-O-methyl-cytidine-3'-phosphate
  modified_base 5: mod_base = OTHER; note = 2'-O-methyl-adenosine-3'-phosphate
  modified_base 6: mod_base = OTHER; note = 2'-deoxy-2'-fluoro-uridine-3'-phosphate
  modified_base 7: mod_base = OTHER; note = 2'-O-methyl-guanosine-3'-phosphate
  modified_base 8: mod_base = OTHER; note = 2'-deoxy-2'-fluoro-guanosine-3'-phosphate
  modified_base 9: mod_base = OTHER; note = 2'-deoxy-2'-fluoro-guanosine-3'-phosphate
  modified_base 10: mod_base = OTHER; note = 2'-O-methyl-adenosine-3'-phosphate
  modified_base 11: mod_base = OTHER; note = 2'-O-methyl-uridine-3'-phosphate
  modified_base 12: mod_base = OTHER; note = 2'-O-methyl-guanosine-3'-phosphate
  modified_base 13: mod_base = OTHER; note = 2'-O-methyl-adenosine-3'-phosphate
  modified_base 14: mod_base = OTHER; note = 2'-deoxy-2'-fluoro-cytidine-3'-phosphate
  modified_base 15: mod_base = OTHER; note = 2'-O-methyl-adenosine-3'-phosphate
  modified_base 16: mod_base = OTHER; note = 2'-deoxy-2'-fluoro-guanosine-3'-phosphate
  modified_base 17: mod_base = OTHER; note = 2'-O-methyl-adenosine-3'-phosphate
  modified_base 18: mod_base = OTHER; note = 2'-O-methyl-uridine-3'-phosphate
  modified_base 19: mod_base = OTHER; note = 2'-O-methyl-uridine-3'-phosphorothioate
  modified_base 20: mod_base = OTHER; note = 2'-O-methyl-uridine-3'-phosphorothioate
  modified_base 21: mod_base = OTHER; note = 2'-O-methyl-uridine-3'-phosphate
ttgcatgggatgacagatttt

SEQ ID NO: 2029 - RNA, 21 nt, synthetic construct
  source 1..21: mol_type = other RNA
  modified_base 1: mod_base = OTHER; note = 2'-O-methyl-uridine-3'-phosphorothioate
  modified_base 2: mod_base = OTHER; note = 2'-deoxy-2'-fluoro-guanosine-3'-phosphorothioate
  modified_base 3: mod_base = OTHER; note = 2'-O-methyl-adenosine-3'-phosphate
  modified_base 4: mod_base = OTHER; note = 2'-O-methyl-adenosine-3'-phosphate
  modified_base 5: mod_base = OTHER; note = 2'-O-methyl-adenosine-3'-phosphate
  modified_base 6: mod_base = OTHER; note = 2'-deoxy-2'-fluoro-cytidine-3'-phosphate
  modified_base 7: mod_base = OTHER; note = 2'-O-methyl-uridine-3'-phosphate
  modified_base 8: mod_base = OTHER; note = 2'-deoxy-2'-fluoro-cytidine-3'-phosphate
  modified_base 9: mod_base = OTHER; note = 2'-deoxy-2'-fluoro-uridine-3'-phosphate
  modified_base 10: mod_base = OTHER; note = 2'-O-methyl-uridine-3'-phosphate
  modified_base 11: mod_base = OTHER; note = 2'-O-methyl-cytidine-3'-phosphate
  modified_base 12: mod_base = OTHER; note = 2'-O-methyl-uridine-3'-phosphate
  modified_base 13: mod_base = OTHER; note = 2'-O-methyl-adenosine-3'-phosphate
  modified_base 14: mod_base = OTHER; note = 2'-deoxy-2'-fluoro-cytidine-3'-phosphate
  modified_base 15: mod_base = OTHER; note = 2'-O-methyl-uridine-3'-phosphate
  modified_base 16: mod_base = OTHER; note = 2'-deoxy-2'-fluoro-cytidine-3'-phosphate
  modified_base 17: mod_base = OTHER; note = 2'-O-methyl-adenosine-3'-phosphate
  modified_base 18: mod_base = OTHER; note = 2'-O-methyl-guanosine-3'-phosphate
  modified_base 19: mod_base = OTHER; note = 2'-O-methyl-guanosine-3'-phosphorothioate
  modified_base 20: mod_base = OTHER; note = 2'-O-methyl-uridine-3'-phosphorothioate
  modified_base 21: mod_base = OTHER; note = 2'-O-methyl-uridine-3'-phosphate
tgaaactcttctactcaggtt

SEQ ID NO: 2030 - RNA, 21 nt, synthetic construct
  source 1..21: mol_type = other RNA
  modified_base 1: mod_base = OTHER; note = 2'-O-methyl-uridine-3'-phosphorothioate
  modified_base 2: mod_base = OTHER; note = 2'-deoxy-2'-fluoro-adenosine-3'-phosphorothioate
  modified_base 3: mod_base = OTHER; note = 2'-O-methyl-uridine-3'-phosphate
  modified_base 4: mod_base = OTHER; note = 2'-O-methyl-cytidine-3'-phosphate
  modified_base 5: mod_base = OTHER; note = 2'-O-methyl-uridine-3'-phosphate
  modified_base 6: mod_base = OTHER; note = 2'-deoxy-2'-fluoro-uridine-3'-phosphate
  modified_base 7: mod_base = OTHER; note = 2'-O-methyl-guanosine-3'-phosphate
  modified_base 8: mod_base = OTHER; note = 2'-deoxy-2'-fluoro-adenosine-3'-phosphate
  modified_base 9: mod_base = OTHER; note = 2'-deoxy-2'-fluoro-cytidine-3'-phosphate
  modified_base 10: mod_base = OTHER; note = 2'-O-methyl-cytidine-3'-phosphate
  modified_base 11: mod_base = OTHER; note = 2'-O-methyl-uridine-3'-phosphate
  modified_base 12: mod_base = OTHER; note = 2'-O-methyl-uridine-3'-phosphate
  modified_base 13: mod_base = OTHER; note = 2'-O-methyl-uridine-3'-phosphate
  modified_base 14: mod_base = OTHER; note = 2'-deoxy-2'-fluoro-uridine-3'-phosphate
  modified_base 15: mod_base = OTHER; note = 2'-O-methyl-cytidine-3'-phosphate
  modified_base 16: mod_base = OTHER; note = 2'-deoxy-2'-fluoro-adenosine-3'-phosphate
  modified_base 17: mod_base = OTHER; note = 2'-O-methyl-cytidine-3'-phosphate
  modified_base 18: mod_base = OTHER; note = 2'-O-methyl-adenosine-3'-phosphate
  modified_base 19: mod_base = OTHER; note = 2'-O-methyl-adenosine-3'-phosphorothioate
  modified_base 20: mod_base = OTHER; note = 2'-O-methyl-uridine-3'-phosphorothioate
  modified_base 21: mod_base = OTHER; note = 2'-O-methyl-uridine-3'-phosphate
tatcttgaccttttcacaatt

SEQ ID NO: 2031 - RNA, 21 nt, synthetic construct
  source 1..21: mol_type = other RNA
  modified_base 1: mod_base = OTHER; note = 2'-O-methyl-uridine-3'-phosphorothioate
  modified_base 2: mod_base = OTHER; note = 2'-deoxy-2'-fluoro-adenosine-3'-phosphorothioate
  modified_base 3: mod_base = OTHER; note = 2'-O-methyl-adenosine-3'-phosphate
  modified_base 4: mod_base = OTHER; note = 2'-O-methyl-uridine-3'-phosphate
  modified_base 5: mod_base = OTHER; note = 2'-O-methyl-cytidine-3'-phosphate
  modified_base 6: mod_base = OTHER; note = 2'-deoxy-2'-fluoro-uridine-3'-phosphate
  modified_base 7: mod_base = OTHER; note = 2'-O-methyl-uridine-3'-phosphate
  modified_base 8: mod_base = OTHER; note = 2'-deoxy-2'-fluoro-guanosine-3'-phosphate
  modified_base 9: mod_base = OTHER; note = 2'-deoxy-2'-fluoro-adenosine-3'-phosphate
  modified_base 10: mod_base = OTHER; note = 2'-O-methyl-cytidine-3'-phosphate
  modified_base 11: mod_base = OTHER; note = 2'-O-methyl-cytidine-3'-phosphate
  modified_base 12: mod_base = OTHER; note = 2'-O-methyl-uridine-3'-phosphate
  modified_base 13: mod_base = OTHER; note = 2'-O-methyl-uridine-3'-phosphate
  modified_base 14: mod_base = OTHER; note = 2'-deoxy-2'-fluoro-uridine-3'-phosphate
  modified_base 15: mod_base = OTHER; note = 2'-O-methyl-uridine-3'-phosphate
  modified_base 16: mod_base = OTHER; note = 2'-deoxy-2'-fluoro-cytidine-3'-phosphate
  modified_base 17: mod_base = OTHER; note = 2'-O-methyl-adenosine-3'-phosphate
  modified_base 18: mod_base = OTHER; note = 2'-O-methyl-cytidine-3'-phosphate
  modified_base 19: mod_base = OTHER; note = 2'-O-methyl-adenosine-3'-phosphorothioate
  modified_base 20: mod_base = OTHER; note = 2'-O-methyl-uridine-3'-phosphorothioate
  modified_base 21: mod_base = OTHER; note = 2'-O-methyl-uridine-3'-phosphate
taatcttgaccttttcacatt

SEQ ID NO: 2032 - RNA, 21 nt, synthetic construct
  source 1..21: mol_type = other RNA
  modified_base 1: mod_base = OTHER; note = 2'-O-methyl-uridine-3'-phosphorothioate
  modified_base 2: mod_base = OTHER; note = 2'-deoxy-2'-fluoro-uridine-3'-phosphorothioate
  modified_base 3: mod_base = OTHER; note = 2'-O-methyl-cytidine-3'-phosphate
  modified_base 4: mod_base = OTHER; note = 2'-O-methyl-uridine-3'-phosphate
  modified_base 5: mod_base = OTHER; note = 2'-O-methyl-uridine-3'-phosphate
  modified_base 6: mod_base = OTHER; note = 2'-deoxy-2'-fluoro-adenosine-3'-phosphate
  modified_base 7: mod_base = OTHER; note = 2'-O-methyl-adenosine-3'-phosphate
  modified_base 8: mod_base = OTHER; note = 2'-deoxy-2'-fluoro-uridine-3'-phosphate
  modified_base 9: mod_base = OTHER; note = 2'-deoxy-2'-fluoro-cytidine-3'-phosphate
  modified_base 10: mod_base = OTHER; note = 2'-O-methyl-uridine-3'-phosphate
  modified_base 11: mod_base = OTHER; note = 2'-O-methyl-uridine-3'-phosphate
  modified_base 12: mod_base = OTHER; note = 2'-O-methyl-guanosine-3'-phosphate
  modified_base 13: mod_base = OTHER; note = 2'-O-methyl-adenosine-3'-phosphate
  modified_base 14: mod_base = OTHER; note = 2'-deoxy-2'-fluoro-cytidine-3'-phosphate
  modified_base 15: mod_base = OTHER; note = 2'-O-methyl-cytidine-3'-phosphate
  modified_base 16: mod_base = OTHER; note = 2'-deoxy-2'-fluoro-uridine-3'-phosphate
  modified_base 17: mod_base = OTHER; note = 2'-O-methyl-uridine-3'-phosphate
  modified_base 18: mod_base = OTHER; note = 2'-O-methyl-uridine-3'-phosphate
  modified_base 19: mod_base = OTHER; note = 2'-O-methyl-uridine-3'-phosphorothioate
  modified_base 20: mod_base = OTHER; note = 2'-O-methyl-uridine-3'-phosphorothioate
  modified_base 21: mod_base = OTHER; note = 2'-O-methyl-uridine-3'-phosphate
ttcttaatcttgacctttttt

SEQ ID NO: 2033 - RNA, 21 nt, synthetic construct
  source 1..21: mol_type = other RNA
  modified_base 1: mod_base = OTHER; note = 2'-O-methyl-uridine-3'-phosphorothioate
  modified_base 2: mod_base = OTHER; note = 2'-deoxy-2'-fluoro-uridine-3'-phosphorothioate
  modified_base 3: mod_base = OTHER; note = 2'-O-methyl-adenosine-3'-phosphate
  modified_base 4: mod_base = OTHER; note = 2'-O-methyl-guanosine-3'-phosphate
  modified_base 5: mod_base = OTHER; note = 2'-O-methyl-uridine-3'-phosphate
  modified_base 6: mod_base = OTHER; note = 2'-deoxy-2'-fluoro-cytidine-3'-phosphate
  modified_base 7: mod_base = OTHER; note = 2'-O-methyl-uridine-3'-phosphate
  modified_base 8: mod_base = OTHER; note = 2'-deoxy-2'-fluoro-uridine-3'-phosphate
  modified_base 9: mod_base = OTHER; note = 2'-deoxy-2'-fluoro-adenosine-3'-phosphate
  modified_base 10: mod_base = OTHER; note = 2'-O-methyl-adenosine-3'-phosphate
  modified_base 11: mod_base = OTHER; note = 2'-O-methyl-uridine-3'-phosphate
  modified_base 12: mod_base = OTHER; note = 2'-O-methyl-cytidine-3'-phosphate
  modified_base 13: mod_base = OTHER; note = 2'-O-methyl-uridine-3'-phosphate
  modified_base 14: mod_base = OTHER; note = 2'-deoxy-2'-fluoro-uridine-3'-phosphate
  modified_base 15: mod_base = OTHER; note = 2'-O-methyl-guanosine-3'-phosphate
  modified_base 16: mod_base = OTHER; note = 2'-deoxy-2'-fluoro-adenosine-3'-phosphate
  modified_base 17: mod_base = OTHER; note = 2'-O-methyl-cytidine-3'-phosphate
  modified_base 18: mod_base = OTHER; note = 2'-O-methyl-cytidine-3'-phosphate
  modified_base 19: mod_base = OTHER; note = 2'-O-methyl-uridine-3'-phosphorothioate
  modified_base 20: mod_base = OTHER; note = 2'-O-methyl-uridine-3'-phosphorothioate
  modified_base 21: mod_base = OTHER; note = 2'-O-methyl-uridine-3'-phosphate
ttagtcttaatcttgaccttt

SEQ ID NO: 2034 - RNA, 21 nt, synthetic construct
  source 1..21: mol_type = other RNA
  modified_base 1: mod_base = OTHER; note = 2'-O-methyl-uridine-3'-phosphorothioate
  modified_base 2: mod_base = OTHER; note = 2'-deoxy-2'-fluoro-uridine-3'-phosphorothioate
  modified_base 3: mod_base = OTHER; note = 2'-O-methyl-uridine-3'-phosphate
  modified_base 4: mod_base = OTHER; note = 2'-O-methyl-uridine-3'-phosphate
  modified_base 5: mod_base = OTHER; note = 2'-O-methyl-adenosine-3'-phosphate
  modified_base 6: mod_base = OTHER; note = 2'-deoxy-2'-fluoro-guanosine-3'-phosphate
  modified_base 7: mod_base = OTHER; note = 2'-O-methyl-uridine-3'-phosphate
  modified_base 8: mod_base = OTHER; note = 2'-deoxy-2'-fluoro-cytidine-3'-phosphate
  modified_base 9: mod_base = OTHER; note = 2'-deoxy-2'-fluoro-uridine-3'-phosphate
  modified_base 10: mod_base = OTHER; note = 2'-O-methyl-uridine-3'-phosphate
  modified_base 11: mod_base = OTHER; note = 2'-O-methyl-adenosine-3'-phosphate
  modified_base 12: mod_base = OTHER; note = 2'-O-methyl-adenosine-3'-phosphate
  modified_base 13: mod_base = OTHER; note = 2'-O-methyl-uridine-3'-phosphate
  modified_base 14: mod_base = OTHER; note = 2'-deoxy-2'-fluoro-cytidine-3'-phosphate
  modified_base 15: mod_base = OTHER; note = 2'-O-methyl-uridine-3'-phosphate
  modified_base 16: mod_base = OTHER; note = 2'-deoxy-2'-fluoro-uridine-3'-phosphate
  modified_base 17: mod_base = OTHER; note = 2'-O-methyl-guanosine-3'-phosphate
  modified_base 18: mod_base = OTHER; note = 2'-O-methyl-adenosine-3'-phosphate
  modified_base 19: mod_base = OTHER; note = 2'-O-methyl-cytidine-3'-phosphorothioate
  modified_base 20: mod_base = OTHER; note = 2'-O-methyl-uridine-3'-phosphorothioate
  modified_base 21: mod_base = OTHER; note = 2'-O-methyl-uridine-3'-phosphate
ttttagtcttaatcttgactt

SEQ ID NO: 2035 - RNA, 21 nt, synthetic construct
  source 1..21: mol_type = other RNA
  modified_base 1: mod_base = OTHER; note = 2'-O-methyl-uridine-3'-phosphorothioate
  modified_base 2: mod_base = OTHER; note = 2'-deoxy-2'-fluoro-uridine-3'-phosphorothioate
  modified_base 3: mod_base = OTHER; note = 2'-O-methyl-uridine-3'-phosphate
  modified_base 4: mod_base = OTHER; note = 2'-O-methyl-uridine-3'-phosphate
  modified_base 5: mod_base = OTHER; note = 2'-O-methyl-uridine-3'-phosphate
  modified_base 6: mod_base = OTHER; note = 2'-deoxy-2'-fluoro-adenosine-3'-phosphate
  modified_base 7: mod_base = OTHER; note = 2'-O-methyl-guanosine-3'-phosphate
  modified_base 8: mod_base = OTHER; note = 2'-deoxy-2'-fluoro-uridine-3'-phosphate
  modified_base 9: mod_base = OTHER; note = 2'-deoxy-2'-fluoro-cytidine-3'-phosphate
  modified_base 10: mod_base = OTHER; note = 2'-O-methyl-uridine-3'-phosphate
  modified_base 11: mod_base = OTHER; note = 2'-O-methyl-uridine-3'-phosphate
  modified_base 12: mod_base = OTHER; note = 2'-O-methyl-adenosine-3'-phosphate
  modified_base 13: mod_base = OTHER; note = 2'-O-methyl-adenosine-3'-phosphate
  modified_base 14: mod_base = OTHER; note = 2'-deoxy-2'-fluoro-uridine-3'-phosphate
  modified_base 15: mod_base = OTHER; note = 2'-O-methyl-cytidine-3'-phosphate
  modified_base 16: mod_base = OTHER; note = 2'-deoxy-2'-fluoro-uridine-3'-phosphate
  modified_base 17: mod_base = OTHER; note = 2'-O-methyl-uridine-3'-phosphate
  modified_base 18: mod_base = OTHER; note = 2'-O-methyl-guanosine-3'-phosphate
  modified_base 19: mod_base = OTHER; note = 2'-O-methyl-adenosine-3'-phosphorothioate
  modified_base 20: mod_base = OTHER; note = 2'-O-methyl-uridine-3'-phosphorothioate
  modified_base 21: mod_base = OTHER; note = 2'-O-methyl-uridine-3'-phosphate
tttttagtcttaatcttgatt

SEQ ID NO: 2036 - RNA, 21 nt, synthetic construct
  source 1..21: mol_type = other RNA
  modified_base 1: mod_base = OTHER; note = 2'-O-methyl-uridine-3'-phosphorothioate
  modified_base 2: mod_base = OTHER; note = 2'-deoxy-2'-fluoro-guanosine-3'-phosphorothioate
  modified_base 3: mod_base = OTHER; note = 2'-O-methyl-uridine-3'-phosphate
  modified_base 4: mod_base = OTHER; note = 2'-O-methyl-uridine-3'-phosphate
  modified_base 5: mod_base = OTHER; note = 2'-O-methyl-uridine-3'-phosphate
  modified_base 6: mod_base = OTHER; note = 2'-deoxy-2'-fluoro-uridine-3'-phosphate
  modified_base 7: mod_base = OTHER; note = 2'-O-methyl-adenosine-3'-phosphate
  modified_base 8: mod_base = OTHER; note = 2'-deoxy-2'-fluoro-guanosine-3'-phosphate
  modified_base 9: mod_base = OTHER; note = 2'-deoxy-2'-fluoro-uridine-3'-phosphate
  modified_base 10: mod_base = OTHER; note = 2'-O-methyl-cytidine-3'-phosphate
  modified_base 11: mod_base = OTHER; note = 2'-O-methyl-uridine-3'-phosphate
  modified_base 12: mod_base = OTHER; note = 2'-O-methyl-uridine-3'-phosphate
  modified_base 13: mod_base = OTHER; note = 2'-O-methyl-adenosine-3'-phosphate
  modified_base 14: mod_base = OTHER; note = 2'-deoxy-2'-fluoro-adenosine-3'-phosphate
  modified_base 15: mod_base = OTHER; note = 2'-O-methyl-uridine-3'-phosphate
  modified_base 16: mod_base = OTHER; note = 2'-deoxy-2'-fluoro-cytidine-3'-phosphate
  modified_base 17: mod_base = OTHER; note = 2'-O-methyl-uridine-3'-phosphate
  modified_base 18: mod_base = OTHER; note = 2'-O-methyl-uridine-3'-phosphate
  modified_base 19: mod_base = OTHER; note = 2'-O-methyl-guanosine-3'-phosphorothioate
  modified_base 20: mod_base = OTHER; note = 2'-O-methyl-uridine-3'-phosphorothioate
  modified_base 21: mod_base = OTHER; note = 2'-O-methyl-uridine-3'-phosphate
tgttttagtcttaatcttgtt

SEQ ID NO: 2037 - RNA, 21 nt, synthetic construct
  source 1..21: mol_type = other RNA
  modified_base 1: mod_base = OTHER; note = 2'-O-methyl-uridine-3'-phosphorothioate
  modified_base 2: mod_base = OTHER; note = 2'-deoxy-2'-fluoro-adenosine-3'-phosphorothioate
  modified_base 3: mod_base = OTHER; note = 2'-O-methyl-guanosine-3'-phosphate
  modified_base 4: mod_base = OTHER; note = 2'-O-methyl-uridine-3'-phosphate
  modified_base 5: mod_base = OTHER; note = 2'-O-methyl-uridine-3'-phosphate
  modified_base 6: mod_base = OTHER; note = 2'-deoxy-2'-fluoro-uridine-3'-phosphate
  modified_base 7: mod_base = OTHER; note = 2'-O-methyl-uridine-3'-phosphate
  modified_base 8: mod_base = OTHER; note = 2'-deoxy-2'-fluoro-adenosine-3'-phosphate
  modified_base 9: mod_base = OTHER; note = 2'-deoxy-2'-fluoro-guanosine-3'-phosphate
  modified_base 10: mod_base = OTHER; note = 2'-O-methyl-uridine-3'-phosphate
  modified_base 11: mod_base = OTHER; note = 2'-O-methyl-cytidine-3'-phosphate
  modified_base 12: mod_base = OTHER; note = 2'-O-methyl-uridine-3'-phosphate
  modified_base 13: mod_base = OTHER; note = 2'-O-methyl-uridine-3'-phosphate
  modified_base 14: mod_base = OTHER; note = 2'-deoxy-2'-fluoro-adenosine-3'-phosphate
  modified_base 15: mod_base = OTHER; note = 2'-O-methyl-adenosine-3'-phosphate
  modified_base 16: mod_base = OTHER; note = 2'-deoxy-2'-fluoro-uridine-3'-phosphate
  modified_base 17: mod_base = OTHER; note = 2'-O-methyl-cytidine-3'-phosphate
  modified_base 18: mod_base = OTHER; note = 2'-O-methyl-uridine-3'-phosphate
  modified_base 19: mod_base = OTHER; note = 2'-O-methyl-uridine-3'-phosphorothioate
  modified_base 20: mod_base = OTHER; note = 2'-O-methyl-uridine-3'-phosphorothioate
  modified_base 21: mod_base = OTHER; note = 2'-O-methyl-uridine-3'-phosphate
tagttttagtcttaatctttt

SEQ ID NO: 2038 - RNA, 21 nt, synthetic construct
  source 1..21: mol_type = other RNA
  modified_base 1: mod_base = OTHER; note = 2'-O-methyl-uridine-3'-phosphorothioate
  modified_base 2: mod_base = OTHER; note = 2'-deoxy-2'-fluoro-adenosine-3'-phosphorothioate
  modified_base 3: mod_base = OTHER; note = 2'-O-methyl-uridine-3'-phosphate
  modified_base 4: mod_base = OTHER; note = 2'-O-methyl-adenosine-3'-phosphate
  modified_base 5: mod_base = OTHER; note = 2'-O-methyl-uridine-3'-phosphate
  modified_base 6: mod_base = OTHER; note = 2'-deoxy-2'-fluoro-adenosine-3'-phosphate
  modified_base 7: mod_base = OTHER; note = 2'-O-methyl-uridine-3'-phosphate
  modified_base 8: mod_base = OTHER; note = 2'-deoxy-2'-fluoro-guanosine-3'-phosphate
  modified_base 9: mod_base = OTHER; note = 2'-deoxy-2'-fluoro-adenosine-3'-phosphate
  modified_base 10: mod_base = OTHER; note = 2'-O-methyl-adenosine-3'-phosphate
  modified_base 11: mod_base = OTHER; note = 2'-O-methyl-guanosine-3'-phosphate
  modified_base 12: mod_base = OTHER; note = 2'-O-methyl-uridine-3'-phosphate
  modified_base 13: mod_base = OTHER; note = 2'-O-methyl-guanosine-3'-phosphate
  modified_base 14: mod_base = OTHER; note = 2'-deoxy-2'-fluoro-adenosine-3'-phosphate
  modified_base 15: mod_base = OTHER; note = 2'-O-methyl-adenosine-3'-phosphate
  modified_base 16: mod_base = OTHER; note = 2'-deoxy-2'-fluoro-cytidine-3'-phosphate
  modified_base 17: mod_base = OTHER; note = 2'-O-methyl-uridine-3'-phosphate
  modified_base 18: mod_base = OTHER; note = 2'-O-methyl-uridine-3'-phosphate
  modified_base 19: mod_base = OTHER; note = 2'-O-methyl-guanosine-3'-phosphorothioate
  modified_base 20: mod_base = OTHER; note = 2'-O-methyl-uridine-3'-phosphorothioate
  modified_base 21: mod_base = OTHER; note = 2'-O-methyl-uridine-3'-phosphate
tatatatgaagtgaacttgtt

SEQ ID NO: 2039 - RNA, 21 nt, synthetic construct
  source 1..21: mol_type = other RNA
  modified_base 1: mod_base = OTHER; note = 2'-O-methyl-uridine-3'-phosphorothioate
  modified_base 2: mod_base = OTHER; note = 2'-deoxy-2'-fluoro-uridine-3'-phosphorothioate
  modified_base 3: mod_base = OTHER; note = 2'-O-methyl-adenosine-3'-phosphate
  modified_base 4: mod_base = OTHER; note = 2'-O-methyl-uridine-3'-phosphate
  modified_base 5: mod_base = OTHER; note = 2'-O-methyl-adenosine-3'-phosphate
  modified_base 6: mod_base = OTHER; note = 2'-deoxy-2'-fluoro-uridine-3'-phosphate
  modified_base 7: mod_base = OTHER; note = 2'-O-methyl-adenosine-3'-phosphate
  modified_base 8: mod_base = OTHER; note = 2'-deoxy-2'-fluoro-uridine-3'-phosphate
  modified_base 9: mod_base = OTHER; note = 2'-deoxy-2'-fluoro-guanosine-3'-phosphate
  modified_base 10: mod_base = OTHER; note = 2'-O-methyl-adenosine-3'-phosphate
  modified_base 11: mod_base = OTHER; note = 2'-O-methyl-adenosine-3'-phosphate
  modified_base 12: mod_base = OTHER; note = 2'-O-methyl-guanosine-3'-phosphate
  modified_base 13: mod_base = OTHER; note = 2'-O-methyl-uridine-3'-phosphate
  modified_base 14: mod_base = OTHER; note = 2'-deoxy-2'-fluoro-guanosine-3'-phosphate
  modified_base 15: mod_base = OTHER; note = 2'-O-methyl-adenosine-3'-phosphate
  modified_base 16: mod_base = OTHER; note = 2'-deoxy-2'-fluoro-adenosine-3'-phosphate
  modified_base 17: mod_base = OTHER; note = 2'-O-methyl-cytidine-3'-phosphate
  modified_base 18: mod_base = OTHER; note = 2'-O-methyl-uridine-3'-phosphate
  modified_base 19: mod_base = OTHER; note = 2'-O-methyl-uridine-3'-phosphorothioate
  modified_base 20: mod_base = OTHER; note = 2'-O-methyl-uridine-3'-phosphorothioate
  modified_base 21: mod_base = OTHER; note = 2'-O-methyl-uridine-3'-phosphate
ttatatatgaagtgaactttt

SEQ ID NO: 2040 - RNA, 21 nt, synthetic construct
  source 1..21: mol_type = other RNA
  modified_base 1: mod_base = OTHER; note = 2'-O-methyl-uridine-3'-phosphorothioate
  modified_base 2: mod_base = OTHER; note = 2'-deoxy-2'-fluoro-uridine-3'-phosphorothioate
  modified_base 3: mod_base = OTHER; note = 2'-O-methyl-adenosine-3'-phosphate
  modified_base 4: mod_base = OTHER; note = 2'-O-methyl-uridine-3'-phosphate
  modified_base 5: mod_base = OTHER; note = 2'-O-methyl-uridine-3'-phosphate
  modified_base 6: mod_base = OTHER; note = 2'-deoxy-2'-fluoro-cytidine-3'-phosphate
  modified_base 7: mod_base = OTHER; note = 2'-O-methyl-adenosine-3'-phosphate
  modified_base 8: mod_base = OTHER; note = 2'-deoxy-2'-fluoro-cytidine-3'-phosphate
  modified_base 9: mod_base = OTHER; note = 2'-deoxy-2'-fluoro-cytidine-3'-phosphate
  modified_base 10: mod_base = OTHER; note = 2'-O-methyl-uridine-3'-phosphate
  modified_base 11: mod_base = OTHER; note = 2'-O-methyl-cytidine-3'-phosphate
  modified_base 12: mod_base = OTHER; note = 2'-O-methyl-adenosine-3'-phosphate
  modified_base 13: mod_base = OTHER; note = 2'-O-methyl-adenosine-3'-phosphate
  modified_base 14: mod_base = OTHER; note = 2'-deoxy-2'-fluoro-adenosine-3'-phosphate
  modified_base 15: mod_base = OTHER; note = 2'-O-methyl-adenosine-3'-phosphate
  modified_base 16: mod_base = OTHER; note = 2'-deoxy-2'-fluoro-guanosine-3'-phosphate
  modified_base 17: mod_base = OTHER; note = 2'-O-methyl-adenosine-3'-phosphate
  modified_base 18: mod_base = OTHER; note = 2'-O-methyl-guanosine-3'-phosphate
  modified_base 19: mod_base = OTHER; note = 2'-O-methyl-uridine-3'-phosphorothioate
  modified_base 20: mod_base = OTHER; note = 2'-O-methyl-uridine-3'-phosphorothioate
  modified_base 21: mod_base = OTHER; note = 2'-O-methyl-uridine-3'-phosphate
ttattcacctcaaaagagttt

SEQ ID NO: 2041 - RNA, 21 nt, synthetic construct
  source 1..21: mol_type = other RNA
  modified_base 1: mod_base = OTHER; note = 2'-O-methyl-uridine-3'-phosphorothioate
  modified_base 2: mod_base = OTHER; note = 2'-deoxy-2'-fluoro-adenosine-3'-phosphorothioate
  modified_base 3: mod_base = OTHER; note = 2'-O-methyl-uridine-3'-phosphate
  modified_base 4: mod_base = OTHER; note = 2'-O-methyl-adenosine-3'-phosphate
  modified_base 5: mod_base = OTHER; note = 2'-O-methyl-uridine-3'-phosphate
  modified_base 6: mod_base = OTHER; note = 2'-deoxy-2'-fluoro-uridine-3'-phosphate
  modified_base 7: mod_base = OTHER; note = 2'-O-methyl-cytidine-3'-phosphate
  modified_base 8: mod_base = OTHER; note = 2'-deoxy-2'-fluoro-adenosine-3'-phosphate
  modified_base 9: mod_base = OTHER; note = 2'-deoxy-2'-fluoro-cytidine-3'-phosphate
  modified_base 10: mod_base = OTHER; note = 2'-O-methyl-cytidine-3'-phosphate
  modified_base 11: mod_base = OTHER; note = 2'-O-methyl-uridine-3'-phosphate
  modified_base 12: mod_base = OTHER; note = 2'-O-methyl-cytidine-3'-phosphate
  modified_base 13: mod_base = OTHER; note = 2'-O-methyl-adenosine-3'-phosphate
  modified_base 14: mod_base = OTHER; note = 2'-deoxy-2'-fluoro-adenosine-3'-phosphate
  modified_base 15: mod_base = OTHER; note = 2'-O-methyl-adenosine-3'-phosphate
  modified_base 16: mod_base = OTHER; note = 2'-deoxy-2'-fluoro-adenosine-3'-phosphate
  modified_base 17: mod_base = OTHER; note = 2'-O-methyl-guanosine-3'-phosphate
  modified_base 18: mod_base = OTHER; note = 2'-O-methyl-adenosine-3'-phosphate
  modified_base 19: mod_base = OTHER; note = 2'-O-methyl-guanosine-3'-phosphorothioate
  modified_base 20: mod_base = OTHER; note = 2'-O-methyl-uridine-3'-phosphorothioate
  modified_base 21: mod_base = OTHER; note = 2'-O-methyl-uridine-3'-phosphate
tatattcacctcaaaagagtt

SEQ ID NO: 2042 - RNA, 21 nt, synthetic construct
  source 1..21: mol_type = other RNA
  modified_base 1: mod_base = OTHER; note = 2'-O-methyl-uridine-3'-phosphorothioate
  modified_base 2: mod_base = OTHER; note = 2'-deoxy-2'-fluoro-uridine-3'-phosphorothioate
  modified_base 3: mod_base = OTHER; note = 2'-O-methyl-adenosine-3'-phosphate
  modified_base 4: mod_base = OTHER; note = 2'-O-methyl-uridine-3'-phosphate
  modified_base 5: mod_base = OTHER; note = 2'-O-methyl-adenosine-3'-phosphate
  modified_base 6: mod_base = OTHER; note = 2'-deoxy-2'-fluoro-uridine-3'-phosphate
  modified_base 7: mod_base = OTHER; note = 2'-O-methyl-uridine-3'-phosphate
  modified_base 8: mod_base = OTHER; note = 2'-deoxy-2'-fluoro-cytidine-3'-phosphate
  modified_base 9: mod_base = OTHER; note = 2'-deoxy-2'-fluoro-adenosine-3'-phosphate
  modified_base 10: mod_base = OTHER; note = 2'-O-methyl-cytidine-3'-phosphate
  modified_base 11: mod_base = OTHER; note = 2'-O-methyl-cytidine-3'-phosphate
  modified_base 12: mod_base = OTHER; note = 2'-O-methyl-uridine-3'-phosphate
  modified_base 13: mod_base = OTHER; note = 2'-O-methyl-cytidine-3'-phosphate
  modified_base 14: mod_base = OTHER; note = 2'-deoxy-2'-fluoro-adenosine-3'-phosphate
  modified_base 15: mod_base = OTHER; note = 2'-O-methyl-adenosine-3'-phosphate
  modified_base 16: mod_base = OTHER; note = 2'-deoxy-2'-fluoro-adenosine-3'-phosphate
  modified_base 17: mod_base = OTHER; note = 2'-O-methyl-adenosine-3'-phosphate
  modified_base 18: mod_base = OTHER; note = 2'-O-methyl-guanosine-3'-phosphate
  modified_base 19: mod_base = OTHER; note = 2'-O-methyl-adenosine-3'-phosphorothioate
  modified_base 20: mod_base = OTHER; note = 2'-O-methyl-uridine-3'-phosphorothioate
  modified_base 21: mod_base = OTHER; note = 2'-O-methyl-uridine-3'-phosphate
ttatattcacctcaaaagatt

SEQ ID NO: 2043 - RNA, 21 nt, synthetic construct
  source 1..21: mol_type = other RNA
  modified_base 1: mod_base = OTHER; note = 2'-O-methyl-uridine-3'-phosphorothioate
  modified_base 2: mod_base = OTHER; note = 2'-deoxy-2'-fluoro-uridine-3'-phosphorothioate
  modified_base 3: mod_base = OTHER; note = 2'-O-methyl-adenosine-3'-phosphate
  modified_base 4: mod_base = OTHER; note = 2'-O-methyl-cytidine-3'-phosphate
  modified_base 5: mod_base = OTHER; note = 2'-O-methyl-uridine-3'-phosphate
  modified_base 6: mod_base = OTHER; note = 2'-deoxy-2'-fluoro-uridine-3'-phosphate
  modified_base 7: mod_base = OTHER; note = 2'-O-methyl-uridine-3'-phosphate
  modified_base 8: mod_base = OTHER; note = 2'-deoxy-2'-fluoro-guanosine-3'-phosphate
  modified_base 9: mod_base = OTHER; note = 2'-deoxy-2'-fluoro-adenosine-3'-phosphate
  modified_base 10: mod_base = OTHER; note = 2'-O-methyl-uridine-3'-phosphate
  modified_base 11: mod_base = OTHER; note = 2'-O-methyl-adenosine-3'-phosphate
  modified_base 12: mod_base = OTHER; note = 2'-O-methyl-cytidine-3'-phosphate
  modified_base 13: mod_base = OTHER; note = 2'-O-methyl-uridine-3'-phosphate
  modified_base 14: mod_base = OTHER; note = 2'-deoxy-2'-fluoro-uridine-3'-phosphate
  modified_base 15: mod_base = OTHER; note = 2'-O-methyl-guanosine-3'-phosphate
  modified_base 16: mod_base = OTHER; note = 2'-deoxy-2'-fluoro-guanosine-3'-phosphate
  modified_base 17: mod_base = OTHER; note = 2'-O-methyl-uridine-3'-phosphate
  modified_base 18: mod_base = OTHER; note = 2'-O-methyl-guanosine-3'-phosphate
  modified_base 19: mod_base = OTHER; note = 2'-O-methyl-adenosine-3'-phosphorothioate
  modified_base 20: mod_base = OTHER; note = 2'-O-methyl-uridine-3'-phosphorothioate
  modified_base 21: mod_base = OTHER; note = 2'-O-methyl-uridine-3'-phosphate
ttactttgatacttggtgatt

SEQ ID NO: 2044 - RNA, 21 nt, synthetic construct
  source 1..21: mol_type = other RNA
  modified_base 1: mod_base = OTHER; note = 2'-O-methyl-uridine-3'-phosphorothioate
  modified_base 2: mod_base = OTHER; note = 2'-deoxy-2'-fluoro-adenosine-3'-phosphorothioate
  modified_base 3: mod_base = OTHER; note = 2'-O-methyl-uridine-3'-phosphate
  modified_base 4: mod_base = OTHER; note = 2'-O-methyl-uridine-3'-phosphate
  modified_base 5: mod_base = OTHER; note = 2'-O-methyl-adenosine-3'-phosphate
  modified_base 6: mod_base = OTHER; note = 2'-deoxy-2'-fluoro-cytidine-3'-phosphate
  modified_base 7: mod_base = OTHER; note = 2'-O-methyl-uridine-3'-phosphate
  modified_base 8: mod_base = OTHER; note = 2'-deoxy-2'-fluoro-uridine-3'-phosphate
  modified_base 9: mod_base = OTHER; note = 2'-deoxy-2'-fluoro-uridine-3'-phosphate
  modified_base 10: mod_base = OTHER; note = 2'-O-methyl-guanosine-3'-phosphate
  modified_base 11: mod_base = OTHER; note = 2'-O-methyl-adenosine-3'-phosphate
  modified_base 12: mod_base = OTHER; note = 2'-O-methyl-uridine-3'-phosphate
  modified_base 13: mod_base = OTHER; note = 2'-O-methyl-adenosine-3'-phosphate
  modified_base 14: mod_base = OTHER; note = 2'-deoxy-2'-fluoro-cytidine-3'-phosphate
  modified_base 15: mod_base = OTHER; note = 2'-O-methyl-uridine-3'-phosphate
  modified_base 16: mod_base = OTHER; note = 2'-deoxy-2'-fluoro-uridine-3'-phosphate
  modified_base 17: mod_base = OTHER; note = 2'-O-methyl-guanosine-3'-phosphate
  modified_base 18: mod_base = OTHER; note = 2'-O-methyl-guanosine-3'-phosphate
  modified_base 19: mod_base = OTHER; note = 2'-O-methyl-uridine-3'-phosphorothioate
  modified_base 20: mod_base = OTHER; note = 2'-O-methyl-uridine-3'-phosphorothioate
  modified_base 21: mod_base = OTHER; note = 2'-O-methyl-uridine-3'-phosphate
tattactttgatacttggttt

SEQ ID NO: 2045 - RNA, 21 nt, synthetic construct
  source 1..21: mol_type = other RNA
  modified_base 1: mod_base = OTHER; note = 2'-O-methyl-uridine-3'-phosphorothioate
  modified_base 2: mod_base = OTHER; note = 2'-deoxy-2'-fluoro-uridine-3'-phosphorothioate
  modified_base 3: mod_base = OTHER; note = 2'-O-methyl-adenosine-3'-phosphate
  modified_base 4: mod_base = OTHER; note = 2'-O-methyl-uridine-3'-phosphate
  modified_base 5: mod_base = OTHER; note = 2'-O-methyl-uridine-3'-phosphate
  modified_base 6: mod_base = OTHER; note = 2'-deoxy-2'-fluoro-adenosine-3'-phosphate
  modified_base 7: mod_base = OTHER; note = 2'-O-methyl-cytidine-3'-phosphate
  modified_base 8: mod_base = OTHER; note = 2'-deoxy-2'-fluoro-uridine-3'-phosphate
  modified_base 9: mod_base = OTHER; note = 2'-deoxy-2'-fluoro-uridine-3'-phosphate
  modified_base 10: mod_base = OTHER; note = 2'-O-methyl-uridine-3'-phosphate
  modified_base 11: mod_base = OTHER; note = 2'-O-methyl-guanosine-3'-phosphate
  modified_base 12: mod_base = OTHER; note = 2'-O-methyl-adenosine-3'-phosphate
  modified_base 13: mod_base = OTHER; note = 2'-O-methyl-uridine-3'-phosphate
  modified_base 14: mod_base = OTHER; note = 2'-deoxy-2'-fluoro-adenosine-3'-phosphate
  modified_base 15: mod_base = OTHER; note = 2'-O-methyl-cytidine-3'-phosphate
  modified_base 16: mod_base = OTHER; note = 2'-deoxy-2'-fluoro-uridine-3'-phosphate
  modified_base 17: mod_base = OTHER; note = 2'-O-methyl-uridine-3'-phosphate
  modified_base 18: mod_base = OTHER; note = 2'-O-methyl-guanosine-3'-phosphate
  modified_base 19: mod_base = OTHER; note = 2'-O-methyl-guanosine-3'-phosphorothioate
  modified_base 20: mod_base = OTHER; note = 2'-O-methyl-uridine-3'-phosphorothioate
  modified_base 21: mod_base = OTHER; note = 2'-O-methyl-uridine-3'-phosphate
ttattactttgatacttggtt

SEQ ID NO: 2046 - RNA, 21 nt, synthetic construct
  source 1..21: mol_type = other RNA
  modified_base 1: mod_base = OTHER; note = 2'-O-methyl-uridine-3'-phosphorothioate
  modified_base 2: mod_base = OTHER; note = 2'-deoxy-2'-fluoro-adenosine-3'-phosphorothioate
  modified_base 3: mod_base = OTHER; note = 2'-O-methyl-uridine-3'-phosphate
  modified_base 4: mod_base = OTHER; note = 2'-O-methyl-adenosine-3'-phosphate
  modified_base 5: mod_base = OTHER; note = 2'-O-methyl-adenosine-3'-phosphate
  modified_base 6: mod_base = OTHER; note = 2'-deoxy-2'-fluoro-uridine-3'-phosphate
  modified_base 7: mod_base = OTHER; note = 2'-O-methyl-guanosine-3'-phosphate
  modified_base 8: mod_base = OTHER; note = 2'-deoxy-2'-fluoro-adenosine-3'-phosphate
  modified_base 9: mod_base = OTHER; note = 2'-deoxy-2'-fluoro-cytidine-3'-phosphate
  modified_base 10: mod_base = OTHER; note = 2'-O-methyl-adenosine-3'-phosphate
  modified_base 11: mod_base = OTHER; note = 2'-O-methyl-cytidine-3'-phosphate
  modified_base 12: mod_base = OTHER; note = 2'-O-methyl-uridine-3'-phosphate
  modified_base 13: mod_base = OTHER; note = 2'-O-methyl-uridine-3'-phosphate
  modified_base 14: mod_base = OTHER; note = 2'-deoxy-2'-fluoro-cytidine-3'-phosphate
  modified_base 15: mod_base = OTHER; note = 2'-O-methyl-adenosine-3'-phosphate
  modified_base 16: mod_base = OTHER; note = 2'-deoxy-2'-fluoro-uridine-3'-phosphate
  modified_base 17: mod_base = OTHER; note = 2'-O-methyl-uridine-3'-phosphate
  modified_base 18: mod_base = OTHER; note = 2'-O-methyl-uridine-3'-phosphate
  modified_base 19: mod_base = OTHER; note = 2'-O-methyl-guanosine-3'-phosphorothioate
  modified_base 20: mod_base = OTHER; note = 2'-O-methyl-uridine-3'-phosphorothioate
  modified_base 21: mod_base = OTHER; note = 2'-O-methyl-uridine-3'-phosphate
tataatgacacttcatttgtt

SEQ ID NO: 2047 - RNA, 21 nt, synthetic construct
  source 1..21: mol_type = other RNA
  modified_base 1: mod_base = OTHER; note = 2'-O-methyl-uridine-3'-phosphorothioate
  modified_base 2: mod_base = OTHER; note = 2'-deoxy-2'-fluoro-adenosine-3'-phosphorothioate
  modified_base 3: mod_base = OTHER; note = 2'-O-methyl-adenosine-3'-phosphate
  modified_base 4: mod_base = OTHER; note = 2'-O-methyl-uridine-3'-phosphate
  modified_base 5: mod_base = OTHER; note = 2'-O-methyl-adenosine-3'-phosphate
  modified_base 6: mod_base = OTHER; note = 2'-deoxy-2'-fluoro-adenosine-3'-phosphate
  modified_base 7: mod_base = OTHER; note = 2'-O-methyl-uridine-3'-phosphate
  modified_base 8: mod_base = OTHER; note = 2'-deoxy-2'-fluoro-guanosine-3'-phosphate
  modified_base 9: mod_base = OTHER; note = 2'-deoxy-2'-fluoro-adenosine-3'-phosphate
  modified_base 10: mod_base = OTHER; note = 2'-O-methyl-cytidine-3'-phosphate
  modified_base 11: mod_base = OTHER; note = 2'-O-methyl-adenosine-3'-phosphate
  modified_base 12: mod_base = OTHER; note = 2'-O-methyl-cytidine-3'-phosphate
  modified_base 13: mod_base = OTHER; note = 2'-O-methyl-uridine-3'-phosphate
  modified_base 14: mod_base = OTHER; note = 2'-deoxy-2'-fluoro-uridine-3'-phosphate
  modified_base 15: mod_base = OTHER; note = 2'-O-methyl-cytidine-3'-phosphate
  modified_base 16: mod_base = OTHER; note = 2'-deoxy-2'-fluoro-adenosine-3'-phosphate
  modified_base 17: mod_base = OTHER; note = 2'-O-methyl-uridine-3'-phosphate
  modified_base 18: mod_base = OTHER; note = 2'-O-methyl-uridine-3'-phosphate
  modified_base 19: mod_base = OTHER; note = 2'-O-methyl-uridine-3'-phosphorothioate
  modified_base 20: mod_base = OTHER; note = 2'-O-methyl-uridine-3'-phosphorothioate
  modified_base 21: mod_base = OTHER; note = 2'-O-methyl-uridine-3'-phosphate
taataatgacacttcattttt

SEQ ID NO: 2048 - RNA, 21 nt, synthetic construct
  source 1..21: mol_type = other RNA
  modified_base 1: mod_base = OTHER; note = 2'-O-methyl-uridine-3'-phosphorothioate
  modified_base 2: mod_base = OTHER; note = 2'-deoxy-2'-fluoro-guanosine-3'-phosphorothioate
  modified_base 3: mod_base = OTHER; note = 2'-O-methyl-adenosine-3'-phosphate
  modified_base 4: mod_base = OTHER; note = 2'-O-methyl-adenosine-3'-phosphate
  modified_base 5: mod_base = OTHER; note = 2'-O-methyl-uridine-3'-phosphate
  modified_base 6: mod_base = OTHER; note = 2'-deoxy-2'-fluoro-adenosine-3'-phosphate
  modified_base 7: mod_base = OTHER; note = 2'-O-methyl-adenosine-3'-phosphate
  modified_base 8: mod_base = OTHER; note = 2'-deoxy-2'-fluoro-uridine-3'-phosphate
  modified_base 9: mod_base = OTHER; note = 2'-deoxy-2'-fluoro-guanosine-3'-phosphate
  modified_base 10: mod_base = OTHER; note = 2'-O-methyl-adenosine-3'-phosphate
  modified_base 11: mod_base = OTHER; note = 2'-O-methyl-cytidine-3'-phosphate
  modified_base 12: mod_base = OTHER; note = 2'-O-methyl-adenosine-3'-phosphate
  modified_base 13: mod_base = OTHER; note = 2'-O-methyl-cytidine-3'-phosphate
  modified_base 14: mod_base = OTHER; note = 2'-deoxy-2'-fluoro-uridine-3'-phosphate
  modified_base 15: mod_base = OTHER; note = 2'-O-methyl-uridine-3'-phosphate
  modified_base 16: mod_base = OTHER; note = 2'-deoxy-2'-fluoro-cytidine-3'-phosphate
  modified_base 17: mod_base = OTHER; note = 2'-O-methyl-adenosine-3'-phosphate
  modified_base 18: mod_base = OTHER; note = 2'-O-methyl-uridine-3'-phosphate
  modified_base 19: mod_base = OTHER; note = 2'-O-methyl-uridine-3'-phosphorothioate
  modified_base 20: mod_base = OTHER; note = 2'-O-methyl-uridine-3'-phosphorothioate
  modified_base 21: mod_base = OTHER; note = 2'-O-methyl-uridine-3'-phosphate
tgaataatgacacttcatttt

SEQ ID NO: 2049 - RNA, 21 nt, synthetic construct
  source 1..21: mol_type = other RNA
  modified_base 1: mod_base = OTHER; note = 2'-O-methyl-uridine-3'-phosphorothioate
  modified_base 2: mod_base = OTHER; note = 2'-deoxy-2'-fluoro-cytidine-3'-phosphorothioate
  modified_base 3: mod_base = OTHER; note = 2'-O-methyl-uridine-3'-phosphate
  modified_base 4: mod_base = OTHER; note = 2'-O-methyl-guanosine-3'-phosphate
  modified_base 5: mod_base = OTHER; note = 2'-O-methyl-uridine-3'-phosphate
  modified_base 6: mod_base = OTHER; note = 2'-deoxy-2'-fluoro-adenosine-3'-phosphate
  modified_base 7: mod_base = OTHER; note = 2'-O-methyl-guanosine-3'-phosphate
  modified_base 8: mod_base = OTHER; note = 2'-deoxy-2'-fluoro-cytidine-3'-phosphate
  modified_base 9: mod_base = OTHER; note = 2'-deoxy-2'-fluoro-uridine-3'-phosphate
  modified_base 10: mod_base = OTHER; note = 2'-O-methyl-uridine-3'-phosphate
  modified_base 11: mod_base = OTHER; note = 2'-O-methyl-uridine-3'-phosphate
  modified_base 12: mod_base = OTHER; note = 2'-O-methyl-uridine-3'-phosphate
  modified_base 13: mod_base = OTHER; note = 2'-O-methyl-guanosine-3'-phosphate
  modified_base 14: mod_base = OTHER; note = 2'-deoxy-2'-fluoro-adenosine-3'-phosphate
  modified_base 15: mod_base = OTHER; note = 2'-O-methyl-cytidine-3'-phosphate
  modified_base 16: mod_base = OTHER; note = 2'-deoxy-2'-fluoro-guanosine-3'-phosphate
  modified_base 17: mod_base = OTHER; note = 2'-O-methyl-uridine-3'-phosphate
  modified_base 18: mod_base = OTHER; note = 2'-O-methyl-guanosine-3'-phosphate
  modified_base 19: mod_base = OTHER; note = 2'-O-methyl-cytidine-3'-phosphorothioate
  modified_base 20: mod_base = OTHER; note = 2'-O-methyl-uridine-3'-phosphorothioate
  modified_base 21: mod_base = OTHER; note = 2'-O-methyl-uridine-3'-phosphate
tctgtagcttttgacgtgctt

SEQ ID NO: 2050 - RNA, 21 nt, synthetic construct
  source 1..21: mol_type = other RNA
  modified_base 1: mod_base = OTHER; note = 2'-O-methyl-uridine-3'-phosphorothioate
  modified_base 2: mod_base = OTHER; note = 2'-deoxy-2'-fluoro-uridine-3'-phosphorothioate
  modified_base 3: mod_base = OTHER; note = 2'-O-methyl-uridine-3'-phosphate
  modified_base 4: mod_base = OTHER; note = 2'-O-methyl-adenosine-3'-phosphate
  modified_base 5: mod_base = OTHER; note = 2'-O-methyl-cytidine-3'-phosphate
  modified_base 6: mod_base = OTHER; note = 2'-deoxy-2'-fluoro-adenosine-3'-phosphate
  modified_base 7: mod_base = OTHER; note = 2'-O-methyl-adenosine-3'-phosphate
  modified_base 8: mod_base = OTHER; note = 2'-deoxy-2'-fluoro-guanosine-3'-phosphate
  modified_base 9: mod_base = OTHER; note = 2'-deoxy-2'-fluoro-adenosine-3'-phosphate
  modified_base 10: mod_base = OTHER; note = 2'-O-methyl-uridine-3'-phosphate
  modified_base 11: mod_base = OTHER; note = 2'-O-methyl-cytidine-3'-phosphate
  modified_base 12: mod_base = OTHER; note = 2'-O-methyl-cytidine-3'-phosphate
  modified_base 13: mod_base = OTHER; note = 2'-O-methyl-adenosine-3'-phosphate
  modified_base 14: mod_base = OTHER; note = 2'-deoxy-2'-fluoro-adenosine-3'-phosphate
  modified_base 15: mod_base = OTHER; note = 2'-O-methyl-cytidine-3'-phosphate
  modified_base 16: mod_base = OTHER; note = 2'-deoxy-2'-fluoro-adenosine-3'-phosphate
  modified_base 17: mod_base = OTHER; note = 2'-O-methyl-guanosine-3'-phosphate
  modified_base 18: mod_base = OTHER; note = 2'-O-methyl-adenosine-3'-phosphate
  modified_base 19: mod_base = OTHER; note = 2'-O-methyl-uridine-3'-phosphorothioate
  modified_base 20: mod_base = OTHER; note = 2'-O-methyl-uridine-3'-phosphorothioate
  modified_base 21: mod_base = OTHER; note = 2'-O-methyl-uridine-3'-phosphate
tttacaagatccaacagattt

SEQ ID NO: 2051 - RNA, 21 nt, synthetic construct
  source 1..21: mol_type = other RNA
  modified_base 1: mod_base = OTHER; note = 2'-O-methyl-uridine-3'-phosphorothioate
  modified_base 2: mod_base = OTHER; note = 2'-deoxy-2'-fluoro-uridine-3'-phosphorothioate
  modified_base 3: mod_base = OTHER; note = 2'-O-methyl-uridine-3'-phosphate
  modified_base 4: mod_base = OTHER; note = 2'-O-methyl-uridine-3'-phosphate
  modified_base 5: mod_base = OTHER; note = 2'-O-methyl-adenosine-3'-phosphate
  modified_base 6: mod_base = OTHER; note = 2'-deoxy-2'-fluoro-cytidine-3'-phosphate
  modified_base 7: mod_base = OTHER; note = 2'-O-methyl-adenosine-3'-phosphate
  modified_base 8: mod_base = OTHER; note = 2'-deoxy-2'-fluoro-adenosine-3'-phosphate
  modified_base 9: mod_base = OTHER; note = 2'-deoxy-2'-fluoro-guanosine-3'-phosphate
  modified_base 10: mod_base = OTHER; note = 2'-O-methyl-adenosine-3'-phosphate
  modified_base 11: mod_base = OTHER; note = 2'-O-methyl-uridine-3'-phosphate
  modified_base 12: mod_base = OTHER; note = 2'-O-methyl-cytidine-3'-phosphate
  modified_base 13: mod_base = OTHER; note = 2'-O-methyl-cytidine-3'-phosphate
  modified_base 14: mod_base = OTHER; note = 2'-deoxy-2'-fluoro-adenosine-3'-phosphate
  modified_base 15: mod_base = OTHER; note = 2'-O-methyl-adenosine-3'-phosphate
  modified_base 16: mod_base = OTHER; note = 2'-deoxy-2'-fluoro-cytidine-3'-phosphate
  modified_base 17: mod_base = OTHER; note = 2'-O-methyl-adenosine-3'-phosphate
  modified_base 18: mod_base = OTHER; note = 2'-O-methyl-guanosine-3'-phosphate
  modified_base 19: mod_base = OTHER; note = 2'-O-methyl-adenosine-3'-phosphorothioate
  modified_base 20: mod_base = OTHER; note = 2'-O-methyl-uridine-3'-phosphorothioate
  modified_base 21: mod_base = OTHER; note = 2'-O-methyl-uridine-3'-phosphate
ttttacaagatccaacagatt

SEQ ID NO: 2052 - RNA, 21 nt, synthetic construct
  source 1..21: mol_type = other RNA
  modified_base 1: mod_base = OTHER; note = 2'-O-methyl-uridine-3'-phosphorothioate
  modified_base 2: mod_base = OTHER; note = 2'-deoxy-2'-fluoro-guanosine-3'-phosphorothioate
  modified_base 3: mod_base = OTHER; note = 2'-O-methyl-uridine-3'-phosphate
  modified_base 4: mod_base = OTHER; note = 2'-O-methyl-uridine-3'-phosphate
  modified_base 5: mod_base = OTHER; note = 2'-O-methyl-uridine-3'-phosphate
  modified_base 6: mod_base = OTHER; note = 2'-deoxy-2'-fluoro-adenosine-3'-phosphate
  modified_base 7: mod_base = OTHER; note = 2'-O-methyl-cytidine-3'-phosphate
  modified_base 8: mod_base = OTHER; note = 2'-deoxy-2'-fluoro-adenosine-3'-phosphate
  modified_base 9: mod_base = OTHER; note = 2'-deoxy-2'-fluoro-adenosine-3'-phosphate
  modified_base 10: mod_base = OTHER; note = 2'-O-methyl-guanosine-3'-phosphate
  modified_base 11: mod_base = OTHER; note = 2'-O-methyl-adenosine-3'-phosphate
  modified_base 12: mod_base = OTHER; note = 2'-O-methyl-uridine-3'-phosphate
  modified_base 13: mod_base = OTHER; note = 2'-O-methyl-cytidine-3'-phosphate
  modified_base 14: mod_base = OTHER; note = 2'-deoxy-2'-fluoro-cytidine-3'-phosphate
  modified_base 15: mod_base = OTHER; note = 2'-O-methyl-adenosine-3'-phosphate
  modified_base 16: mod_base = OTHER; note = 2'-deoxy-2'-fluoro-adenosine-3'-phosphate
  modified_base 17: mod_base = OTHER; note = 2'-O-methyl-cytidine-3'-phosphate
  modified_base 18: mod_base = OTHER; note = 2'-O-methyl-adenosine-3'-phosphate
  modified_base 19: mod_base = OTHER; note = 2'-O-methyl-guanosine-3'-phosphorothioate
  modified_base 20: mod_base = OTHER; note = 2'-O-methyl-uridine-3'-phosphorothioate
  modified_base 21: mod_base = OTHER; note = 2'-O-methyl-uridine-3'-phosphate
tgtttacaagatccaacagtt

SEQ ID NO: 2053 - RNA, 21 nt, synthetic construct
  source 1..21: mol_type = other RNA
  modified_base 1: mod_base = OTHER; note = 2'-O-methyl-uridine-3'-phosphorothioate
  modified_base 2: mod_base = OTHER; note = 2'-deoxy-2'-fluoro-uridine-3'-phosphorothioate
  modified_base 3: mod_base = OTHER; note = 2'-O-methyl-guanosine-3'-phosphate
  modified_base 4: mod_base = OTHER; note = 2'-O-methyl-uridine-3'-phosphate
  modified_base 5: mod_base = OTHER; note = 2'-O-methyl-uridine-3'-phosphate
  modified_base 6: mod_base = OTHER; note = 2'-deoxy-2'-fluoro-uridine-3'-phosphate
  modified_base 7: mod_base = OTHER; note = 2'-O-methyl-adenosine-3'-phosphate
  modified_base 8: mod_base = OTHER; note = 2'-deoxy-2'-fluoro-cytidine-3'-phosphate
  modified_base 9: mod_base = OTHER; note = 2'-deoxy-2'-fluoro-adenosine-3'-phosphate
  modified_base 10: mod_base = OTHER; note = 2'-O-methyl-adenosine-3'-phosphate
  modified_base 11: mod_base = OTHER; note = 2'-O-methyl-guanosine-3'-phosphate
  modified_base 12: mod_base = OTHER; note = 2'-O-methyl-adenosine-3'-phosphate
  modified_base 13: mod_base = OTHER; note = 2'-O-methyl-uridine-3'-phosphate
  modified_base 14: mod_base = OTHER; note = 2'-deoxy-2'-fluoro-cytidine-3'-phosphate
  modified_base 15: mod_base = OTHER; note = 2'-O-methyl-cytidine-3'-phosphate
  modified_base 16: mod_base = OTHER; note = 2'-deoxy-2'-fluoro-adenosine-3'-phosphate
  modified_base 17: mod_base = OTHER; note = 2'-O-methyl-adenosine-3'-phosphate
  modified_base 18: mod_base = OTHER; note = 2'-O-methyl-cytidine-3'-phosphate
  modified_base 19: mod_base = OTHER; note = 2'-O-methyl-adenosine-3'-phosphorothioate
  modified_base 20: mod_base = OTHER; note = 2'-O-methyl-uridine-3'-phosphorothioate
  modified_base 21: mod_base = OTHER; note = 2'-O-methyl-uridine-3'-phosphate
ttgtttacaagatccaacatt

SEQ ID NO: 2054 - RNA, 21 nt, synthetic construct
  source 1..21: mol_type = other RNA
  modified_base 1: mod_base = OTHER; note = 2'-O-methyl-uridine-3'-phosphorothioate
  modified_base 2: mod_base = OTHER; note = 2'-deoxy-2'-fluoro-adenosine-3'-phosphorothioate
  modified_base 3: mod_base = OTHER; note = 2'-O-methyl-uridine-3'-phosphate
  modified_base 4: mod_base = OTHER; note = 2'-O-methyl-guanosine-3'-phosphate
  modified_base 5: mod_base = OTHER; note = 2'-O-methyl-uridine-3'-phosphate
  modified_base 6: mod_base = OTHER; note = 2'-deoxy-2'-fluoro-uridine-3'-phosphate
  modified_base 7: mod_base = OTHER; note = 2'-O-methyl-uridine-3'-phosphate
  modified_base 8: mod_base = OTHER; note = 2'-deoxy-2'-fluoro-adenosine-3'-phosphate
  modified_base 9: mod_base = OTHER; note = 2'-deoxy-2'-fluoro-cytidine-3'-phosphate
  modified_base 10: mod_base = OTHER; note = 2'-O-methyl-adenosine-3'-phosphate
  modified_base 11: mod_base = OTHER; note = 2'-O-methyl-adenosine-3'-phosphate
  modified_base 12: mod_base = OTHER; note = 2'-O-methyl-guanosine-3'-phosphate
  modified_base 13: mod_base = OTHER; note = 2'-O-methyl-adenosine-3'-phosphate
  modified_base 14: mod_base = OTHER; note = 2'-deoxy-2'-fluoro-uridine-3'-phosphate
  modified_base 15: mod_base = OTHER; note = 2'-O-methyl-cytidine-3'-phosphate
  modified_base 16: mod_base = OTHER; note = 2'-deoxy-2'-fluoro-cytidine-3'-phosphate
  modified_base 17: mod_base = OTHER; note = 2'-O-methyl-adenosine-3'-phosphate
  modified_base 18: mod_base = OTHER; note = 2'-O-methyl-adenosine-3'-phosphate
  modified_base 19: mod_base = OTHER; note = 2'-O-methyl-cytidine-3'-phosphorothioate
  modified_base 20: mod_base = OTHER; note = 2'-O-methyl-uridine-3'-phosphorothioate
  modified_base 21: mod_base = OTHER; note = 2'-O-methyl-uridine-3'-phosphate
tatgtttacaagatccaactt

SEQ ID NO: 2055 - RNA, 21 nt, synthetic construct
  source 1..21: mol_type = other RNA
  modified_base 1: mod_base = OTHER; note = 2'-O-methyl-uridine-3'-phosphorothioate
  modified_base 2: mod_base = OTHER; note = 2'-deoxy-2'-fluoro-uridine-3'-phosphorothioate
  modified_base 3: mod_base = OTHER; note = 2'-O-methyl-guanosine-3'-phosphate
  modified_base 4: mod_base = OTHER; note = 2'-O-methyl-adenosine-3'-phosphate
  modified_base 5: mod_base = OTHER; note = 2'-O-methyl-guanosine-3'-phosphate
  modified_base 6: mod_base = OTHER; note = 2'-deoxy-2'-fluoro-guanosine-3'-phosphate
  modified_base 7: mod_base = OTHER; note = 2'-O-methyl-adenosine-3'-phosphate
  modified_base 8: mod_base = OTHER; note = 2'-deoxy-2'-fluoro-adenosine-3'-phosphate
  modified_base 9: mod_base = OTHER; note = 2'-deoxy-2'-fluoro-adenosine-3'-phosphate
  modified_base 10: mod_base = OTHER; note = 2'-O-methyl-uridine-3'-phosphate
  modified_base 11: mod_base = OTHER; note = 2'-O-methyl-cytidine-3'-phosphate
  modified_base 12: mod_base = OTHER; note = 2'-O-methyl-adenosine-3'-phosphate
  modified_base 13: mod_base = OTHER; note = 2'-O-methyl-adenosine-3'-phosphate
  modified_base 14: mod_base = OTHER; note = 2'-deoxy-2'-fluoro-cytidine-3'-phosphate
  modified_base 15: mod_base = OTHER; note = 2'-O-methyl-adenosine-3'-phosphate
  modified_base 16: mod_base = OTHER; note = 2'-deoxy-2'-fluoro-guanosine-3'-phosphate
  modified_base 17: mod_base = OTHER; note = 2'-O-methyl-uridine-3'-phosphate
  modified_base 18: mod_base = OTHER; note = 2'-O-methyl-uridine-3'-phosphate
  modified_base 19: mod_base = OTHER; note = 2'-O-methyl-guanosine-3'-phosphorothioate
  modified_base 20: mod_base = OTHER; note = 2'-O-methyl-uridine-3'-phosphorothioate
  modified_base 21: mod_base = OTHER; note = 2'-O-methyl-uridine-3'-phosphate
ttgaggaaatcaacagttgtt

SEQ ID NO: 2056 - RNA, 21 nt, synthetic construct
  source 1..21: mol_type = other RNA
  modified_base 1: mod_base = OTHER; note = 2'-O-methyl-uridine-3'-phosphorothioate
  modified_base 2: mod_base = OTHER; note = 2'-deoxy-2'-fluoro-adenosine-3'-phosphorothioate
  modified_base 3: mod_base = OTHER; note = 2'-O-methyl-adenosine-3'-phosphate
  modified_base 4: mod_base = OTHER; note = 2'-O-methyl-adenosine-3'-phosphate
  modified_base 5: mod_base = OTHER; note = 2'-O-methyl-uridine-3'-phosphate
  modified_base 6: mod_base = OTHER; note = 2'-deoxy-2'-fluoro-uridine-3'-phosphate
  modified_base 7: mod_base = OTHER; note = 2'-O-methyl-uridine-3'-phosphate
  modified_base 8: mod_base = OTHER; note = 2'-deoxy-2'-fluoro-guanosine-3'-phosphate
  modified_base 9: mod_base = OTHER; note = 2'-deoxy-2'-fluoro-uridine-3'-phosphate
  modified_base 10: mod_base = OTHER; note = 2'-O-methyl-guanosine-3'-phosphate
  modified_base 11: mod_base = OTHER; note = 2'-O-methyl-adenosine-3'-phosphate
  modified_base 12: mod_base = OTHER; note = 2'-O-methyl-guanosine-3'-phosphate
  modified_base 13: mod_base = OTHER; note = 2'-O-methyl-cytidine-3'-phosphate
  modified_base 14: mod_base = OTHER; note = 2'-deoxy-2'-fluoro-cytidine-3'-phosphate
  modified_base 15: mod_base = OTHER; note = 2'-O-methyl-adenosine-3'-phosphate
  modified_base 16: mod_base = OTHER; note = 2'-deoxy-2'-fluoro-uridine-3'-phosphate
  modified_base 17: mod_base = OTHER; note = 2'-O-methyl-guanosine-3'-phosphate
  modified_base 18: mod_base = OTHER; note = 2'-O-methyl-uridine-3'-phosphate
  modified_base 19: mod_base = OTHER; note = 2'-O-methyl-uridine-3'-phosphorothioate
  modified_base 20: mod_base = OTHER; note = 2'-O-methyl-uridine-3'-phosphorothioate
  modified_base 21: mod_base = OTHER; note = 2'-O-methyl-uridine-3'-phosphate
taaatttgtgagccatgtttt

SEQ ID NO: 2057 - RNA, 21 nt, synthetic construct
  source 1..21: mol_type = other RNA
  modified_base 1: mod_base = OTHER; note = 2'-O-methyl-uridine-3'-phosphorothioate
  modified_base 2: mod_base = OTHER; note = 2'-deoxy-2'-fluoro-uridine-3'-phosphorothioate
  modified_base 3: mod_base = OTHER; note = 2'-O-methyl-guanosine-3'-phosphate
  modified_base 4: mod_base = OTHER; note = 2'-O-methyl-guanosine-3'-phosphate
  modified_base 5: mod_base = OTHER; note = 2'-O-methyl-guanosine-3'-phosphate
  modified_base 6: mod_base = OTHER; note = 2'-deoxy-2'-fluoro-adenosine-3'-phosphate
  modified_base 7: mod_base = OTHER; note = 2'-O-methyl-uridine-3'-phosphate
  modified_base 8: mod_base = OTHER; note = 2'-deoxy-2'-fluoro-adenosine-3'-phosphate
  modified_base 9: mod_base = OTHER; note = 2'-deoxy-2'-fluoro-guanosine-3'-phosphate
  modified_base 10: mod_base = OTHER; note = 2'-O-methyl-adenosine-3'-phosphate
  modified_base 11: mod_base = OTHER; note = 2'-O-methyl-adenosine-3'-phosphate
  modified_base 12: mod_base = OTHER; note = 2'-O-methyl-adenosine-3'-phosphate
  modified_base 13: mod_base = OTHER; note = 2'-O-methyl-uridine-3'-phosphate
  modified_base 14: mod_base = OTHER; note = 2'-deoxy-2'-fluoro-uridine-3'-phosphate
  modified_base 15: mod_base = OTHER; note = 2'-O-methyl-uridine-3'-phosphate
  modified_base 16: mod_base = OTHER; note = 2'-deoxy-2'-fluoro-guanosine-3'-phosphate
  modified_base 17: mod_base = OTHER; note = 2'-O-methyl-uridine-3'-phosphate
  modified_base 18: mod_base = OTHER; note = 2'-O-methyl-guanosine-3'-phosphate
  modified_base 19: mod_base = OTHER; note = 2'-O-methyl-adenosine-3'-phosphorothioate
  modified_base 20: mod_base = OTHER; note = 2'-O-methyl-uridine-3'-phosphorothioate
  modified_base 21: mod_base = OTHER; note = 2'-O-methyl-uridine-3'-phosphate
ttgggatagaaatttgtgatt

SEQ ID NO: 2058 - RNA, 21 nt, synthetic construct
  source 1..21: mol_type = other RNA
  modified_base 1: mod_base = OTHER; note = 2'-O-methyl-uridine-3'-phosphorothioate
  modified_base 2: mod_base = OTHER; note = 2'-deoxy-2'-fluoro-adenosine-3'-phosphorothioate
  modified_base 3: mod_base = OTHER; note = 2'-O-methyl-guanosine-3'-phosphate
  modified_base 4: mod_base = OTHER; note = 2'-O-methyl-adenosine-3'-phosphate
  modified_base 5: mod_base = OTHER; note = 2'-O-methyl-uridine-3'-phosphate
  modified_base 6: mod_base = OTHER; note = 2'-deoxy-2'-fluoro-uridine-3'-phosphate
  modified_base 7: mod_base = OTHER; note = 2'-O-methyl-uridine-3'-phosphate
  modified_base 8: mod_base = OTHER; note = 2'-deoxy-2'-fluoro-guanosine-3'-phosphate
  modified_base 9: mod_base = OTHER; note = 2'-deoxy-2'-fluoro-guanosine-3'-phosphate
  modified_base 10: mod_base = OTHER; note = 2'-O-methyl-guanosine-3'-phosphate
  modified_base 11: mod_base = OTHER; note = 2'-O-methyl-adenosine-3'-phosphate
  modified_base 12: mod_base = OTHER; note = 2'-O-methyl-uridine-3'-phosphate
  modified_base 13: mod_base = OTHER; note = 2'-O-methyl-adenosine-3'-phosphate
  modified_base 14: mod_base = OTHER; note = 2'-deoxy-2'-fluoro-guanosine-3'-phosphate
  modified_base 15: mod_base = OTHER; note = 2'-O-methyl-adenosine-3'-phosphate
  modified_base 16: mod_base = OTHER; note = 2'-deoxy-2'-fluoro-adenosine-3'-phosphate
  modified_base 17: mod_base = OTHER; note = 2'-O-methyl-adenosine-3'-phosphate
  modified_base 18: mod_base = OTHER; note = 2'-O-methyl-uridine-3'-phosphate
  modified_base 19: mod_base = OTHER; note = 2'-O-methyl-uridine-3'-phosphorothioate
  modified_base 20: mod_base = OTHER; note = 2'-O-methyl-uridine-3'-phosphorothioate
  modified_base 21: mod_base = OTHER; note = 2'-O-methyl-uridine-3'-phosphate
tagatttgggatagaaatttt

SEQ ID NO: 2059 - RNA, 21 nt, synthetic construct
  source 1..21: mol_type = other RNA
  modified_base 1: mod_base = OTHER; note = 2'-O-methyl-uridine-3'-phosphorothioate
  modified_base 2: mod_base = OTHER; note = 2'-deoxy-2'-fluoro-adenosine-3'-phosphorothioate
  modified_base 3: mod_base = OTHER; note = 2'-O-methyl-adenosine-3'-phosphate
  modified_base 4: mod_base = OTHER; note = 2'-O-methyl-guanosine-3'-phosphate
  modified_base 5: mod_base = OTHER; note = 2'-O-methyl-adenosine-3'-phosphate
  modified_base 6: mod_base = OTHER; note = 2'-deoxy-2'-fluoro-uridine-3'-phosphate
  modified_base 7: mod_base = OTHER; note = 2'-O-methyl-uridine-3'-phosphate
  modified_base 8: mod_base = OTHER; note = 2'-deoxy-2'-fluoro-uridine-3'-phosphate
  modified_base 9: mod_base = OTHER; note = 2'-deoxy-2'-fluoro-guanosine-3'-phosphate
  modified_base 10: mod_base = OTHER; note = 2'-O-methyl-guanosine-3'-phosphate
  modified_base 11: mod_base = OTHER; note = 2'-O-methyl-guanosine-3'-phosphate
  modified_base 12: mod_base = OTHER; note = 2'-O-methyl-adenosine-3'-phosphate
  modified_base 13: mod_base = OTHER; note = 2'-O-methyl-uridine-3'-phosphate
  modified_base 14: mod_base = OTHER; note = 2'-deoxy-2'-fluoro-adenosine-3'-phosphate
  modified_base 15: mod_base = OTHER; note = 2'-O-methyl-guanosine-3'-phosphate
  modified_base 16: mod_base = OTHER; note = 2'-deoxy-2'-fluoro-adenosine-3'-phosphate
  modified_base 17: mod_base = OTHER; note = 2'-O-methyl-adenosine-3'-phosphate
  modified_base 18: mod_base = OTHER; note = 2'-O-methyl-adenosine-3'-phosphate
  modified_base 19: mod_base = OTHER; note = 2'-O-methyl-uridine-3'-phosphorothioate
  modified_base 20: mod_base = OTHER; note = 2'-O-methyl-uridine-3'-phosphorothioate
  modified_base 21: mod_base = OTHER; note = 2'-O-methyl-uridine-3'-phosphate
taagatttgggatagaaattt

SEQ ID NO: 2060 - RNA, 21 nt, synthetic construct
  source 1..21: mol_type = other RNA
  modified_base 1: mod_base = OTHER; note = 2'-O-methyl-uridine-3'-phosphorothioate
  modified_base 2: mod_base = OTHER; note = 2'-deoxy-2'-fluoro-uridine-3'-phosphorothioate
  modified_base 3: mod_base = OTHER; note = 2'-O-methyl-uridine-3'-phosphate
  modified_base 4: mod_base = OTHER; note = 2'-O-methyl-adenosine-3'-phosphate
  modified_base 5: mod_base = OTHER; note = 2'-O-methyl-uridine-3'-phosphate
  modified_base 6: mod_base = OTHER; note = 2'-deoxy-2'-fluoro-adenosine-3'-phosphate
  modified_base 7: mod_base = OTHER; note = 2'-O-methyl-uridine-3'-phosphate
  modified_base 8: mod_base = OTHER; note = 2'-deoxy-2'-fluoro-uridine-3'-phosphate
  modified_base 9: mod_base = OTHER; note = 2'-deoxy-2'-fluoro-cytidine-3'-phosphate
  modified_base 10: mod_base = OTHER; note = 2'-O-methyl-adenosine-3'-phosphate
  modified_base 11: mod_base = OTHER; note = 2'-O-methyl-cytidine-3'-phosphate
  modified_base 12: mod_base = OTHER; note = 2'-O-methyl-cytidine-3'-phosphate
  modified_base 13: mod_base = OTHER; note = 2'-O-methyl-uridine-3'-phosphate
  modified_base 14: mod_base = OTHER; note = 2'-deoxy-2'-fluoro-cytidine-3'-phosphate
  modified_base 15: mod_base = OTHER; note = 2'-O-methyl-adenosine-3'-phosphate
  modified_base 16: mod_base = OTHER; note = 2'-deoxy-2'-fluoro-adenosine-3'-phosphate
  modified_base 17: mod_base = OTHER; note = 2'-O-methyl-adenosine-3'-phosphate
  modified_base 18: mod_base = OTHER; note = 2'-O-methyl-adenosine-3'-phosphate
  modified_base 19: mod_base = OTHER; note = 2'-O-methyl-guanosine-3'-phosphorothioate
  modified_base 20: mod_base = OTHER; note = 2'-O-methyl-uridine-3'-phosphorothioate
  modified_base 21: mod_base = OTHER; note = 2'-O-methyl-uridine-3'-phosphate
tttatattcacctcaaaagtt

SEQ ID NO: 2061 - RNA, 21 nt, synthetic construct
  source 1..21: mol_type = other RNA
  modified_base 1: mod_base = OTHER; note = 2'-O-methyl-uridine-3'-phosphorothioate
  modified_base 2: mod_base = OTHER; note = 2'-deoxy-2'-fluoro-cytidine-3'-phosphorothioate
  modified_base 3: mod_base = OTHER; note = 2'-O-methyl-uridine-3'-phosphate
  modified_base 4: mod_base = OTHER; note = 2'-O-methyl-uridine-3'-phosphate
  modified_base 5: mod_base = OTHER; note = 2'-O-methyl-guanosine-3'-phosphate
  modified_base 6: mod_base = OTHER; note = 2'-deoxy-2'-fluoro-guanosine-3'-phosphate
  modified_base 7: mod_base = OTHER; note = 2'-O-methyl-uridine-3'-phosphate
  modified_base 8: mod_base = OTHER; note = 2'-deoxy-2'-fluoro-guanosine-3'-phosphate
  modified_base 9: mod_base = OTHER; note = 2'-deoxy-2'-fluoro-adenosine-3'-phosphate
  modified_base 10: mod_base = OTHER; note = 2'-O-methyl-adenosine-3'-phosphate
  modified_base 11: mod_base = OTHER; note = 2'-O-methyl-guanosine-3'-phosphate
  modified_base 12: mod_base = OTHER; note = 2'-O-methyl-adenosine-3'-phosphate
  modified_base 13: mod_base = OTHER; note = 2'-O-methyl-cytidine-3'-phosphate
  modified_base 14: mod_base = OTHER; note = 2'-deoxy-2'-fluoro-cytidine-3'-phosphate
  modified_base 15: mod_base = OTHER; note = 2'-O-methyl-uridine-3'-phosphate
  modified_base 16: mod_base = OTHER; note = 2'-deoxy-2'-fluoro-guanosine-3'-phosphate
  modified_base 17: mod_base = OTHER; note = 2'-O-methyl-adenosine-3'-phosphate
  modified_base 18: mod_base = OTHER; note = 2'-O-methyl-adenosine-3'-phosphate
  modified_base 19: mod_base = OTHER; note = 2'-O-methyl-adenosine-3'-phosphorothioate
  modified_base 20: mod_base = OTHER; note = 2'-O-methyl-uridine-3'-phosphorothioate
  modified_base 21: mod_base = OTHER; note = 2'-O-methyl-uridine-3'-phosphate
tcttggtgaagacctgaaatt

SEQ ID NO: 2062 - RNA, 21 nt, synthetic construct
  source 1..21: mol_type = other RNA
  modified_base 1: mod_base = OTHER; note = 2'-O-methyl-uridine-3'-phosphorothioate
  modified_base 2: mod_base = OTHER; note = 2'-deoxy-2'-fluoro-adenosine-3'-phosphorothioate
  modified_base 3: mod_base = OTHER; note = 2'-O-methyl-cytidine-3'-phosphate
  modified_base 4: mod_base = OTHER; note = 2'-O-methyl-uridine-3'-phosphate
  modified_base 5: mod_base = OTHER; note = 2'-O-methyl-uridine-3'-phosphate
  modified_base 6: mod_base = OTHER; note = 2'-deoxy-2'-fluoro-guanosine-3'-phosphate
  modified_base 7: mod_base = OTHER; note = 2'-O-methyl-guanosine-3'-phosphate
  modified_base 8: mod_base = OTHER; note = 2'-deoxy-2'-fluoro-uridine-3'-phosphate
  modified_base 9: mod_base = OTHER; note = 2'-deoxy-2'-fluoro-guanosine-3'-phosphate
  modified_base 10: mod_base = OTHER; note = 2'-O-methyl-adenosine-3'-phosphate
  modified_base 11: mod_base = OTHER; note = 2'-O-methyl-adenosine-3'-phosphate
  modified_base 12: mod_base = OTHER; note = 2'-O-methyl-guanosine-3'-phosphate
  modified_base 13: mod_base = OTHER; note = 2'-O-methyl-adenosine-3'-phosphate
  modified_base 14: mod_base = OTHER; note = 2'-deoxy-2'-fluoro-cytidine-3'-phosphate
  modified_base 15: mod_base = OTHER; note = 2'-O-methyl-cytidine-3'-phosphate
  modified_base 16: mod_base = OTHER; note = 2'-deoxy-2'-fluoro-uridine-3'-phosphate
  modified_base 17: mod_base = OTHER; note = 2'-O-methyl-guanosine-3'-phosphate
  modified_base 18: mod_base = OTHER; note = 2'-O-methyl-adenosine-3'-phosphate
  modified_base 19: mod_base = OTHER; note = 2'-O-methyl-adenosine-3'-phosphorothioate
  modified_base 20: mod_base = OTHER; note = 2'-O-methyl-uridine-3'-phosphorothioate
  modified_base 21: mod_base = OTHER; note = 2'-O-methyl-uridine-3'-phosphate
tacttggtgaagacctgaatt

SEQ ID NO: 2063 - RNA, 21 nt, synthetic construct
  source 1..21: mol_type = other RNA
  modified_base 1: mod_base = OTHER; note = 2'-O-methyl-uridine-3'-phosphorothioate
  modified_base 2: mod_base = OTHER; note = 2'-deoxy-2'-fluoro-uridine-3'-phosphorothioate
  modified_base 3: mod_base = OTHER; note = 2'-O-methyl-adenosine-3'-phosphate
  modified_base 4: mod_base = OTHER; note = 2'-O-methyl-cytidine-3'-phosphate
  modified_base 5: mod_base = OTHER; note = 2'-O-methyl-uridine-3'-phosphate
  modified_base 6: mod_base = OTHER; note = 2'-deoxy-2'-fluoro-uridine-3'-phosphate
  modified_base 7: mod_base = OTHER; note = 2'-O-methyl-guanosine-3'-phosphate
  modified_base 8: mod_base = OTHER; note = 2'-deoxy-2'-fluoro-guanosine-3'-phosphate
  modified_base 9: mod_base = OTHER; note = 2'-deoxy-2'-fluoro-uridine-3'-phosphate
  modified_base 10: mod_base = OTHER; note = 2'-O-methyl-guanosine-3'-phosphate
  modified_base 11: mod_base = OTHER; note = 2'-O-methyl-adenosine-3'-phosphate
  modified_base 12: mod_base = OTHER; note = 2'-O-methyl-adenosine-3'-phosphate
  modified_base 13: mod_base = OTHER; note = 2'-O-methyl-guanosine-3'-phosphate
  modified_base 14: mod_base = OTHER; note = 2'-deoxy-2'-fluoro-adenosine-3'-phosphate
  modified_base 15: mod_base = OTHER; note = 2'-O-methyl-cytidine-3'-phosphate
  modified_base 16: mod_base = OTHER; note = 2'-deoxy-2'-fluoro-cytidine-3'-phosphate
  modified_base 17: mod_base = OTHER; note = 2'-O-methyl-uridine-3'-phosphate
  modified_base 18: mod_base = OTHER; note = 2'-O-methyl-guanosine-3'-phosphate
  modified_base 19: mod_base = OTHER; note = 2'-O-methyl-adenosine-3'-phosphorothioate
  modified_base 20: mod_base = OTHER; note = 2'-O-methyl-uridine-3'-phosphorothioate
  modified_base 21: mod_base = OTHER; note = 2'-O-methyl-uridine-3'-phosphate
ttacttggtgaagacctgatt

SEQ ID NO: 2064 - RNA, 21 nt, synthetic construct
  source 1..21: mol_type = other RNA
  modified_base 1: mod_base = OTHER; note = 2'-O-methyl-uridine-3'-phosphorothioate
  modified_base 2: mod_base = OTHER; note = 2'-deoxy-2'-fluoro-adenosine-3'-phosphorothioate
  modified_base 3: mod_base = OTHER; note = 2'-O-methyl-uridine-3'-phosphate
  modified_base 4: mod_base = OTHER; note = 2'-O-methyl-adenosine-3'-phosphate
  modified_base 5: mod_base = OTHER; note = 2'-O-methyl-cytidine-3'-phosphate
  modified_base 6: mod_base = OTHER; note = 2'-deoxy-2'-fluoro-uridine-3'-phosphate
  modified_base 7: mod_base = OTHER; note = 2'-O-methyl-uridine-3'-phosphate
  modified_base 8: mod_base = OTHER; note = 2'-deoxy-2'-fluoro-guanosine-3'-phosphate
  modified_base 9: mod_base = OTHER; note = 2'-deoxy-2'-fluoro-guanosine-3'-phosphate
  modified_base 10: mod_base = OTHER; note = 2'-O-methyl-uridine-3'-phosphate
  modified_base 11: mod_base = OTHER; note = 2'-O-methyl-guanosine-3'-phosphate
  modified_base 12: mod_base = OTHER; note = 2'-O-methyl-adenosine-3'-phosphate
  modified_base 13: mod_base = OTHER; note = 2'-O-methyl-adenosine-3'-phosphate
  modified_base 14: mod_base = OTHER; note = 2'-deoxy-2'-fluoro-guanosine-3'-phosphate
  modified_base 15: mod_base = OTHER; note = 2'-O-methyl-adenosine-3'-phosphate
  modified_base 16: mod_base = OTHER; note = 2'-deoxy-2'-fluoro-cytidine-3'-phosphate
  modified_base 17: mod_base = OTHER; note = 2'-O-methyl-cytidine-3'-phosphate
  modified_base 18: mod_base = OTHER; note = 2'-O-methyl-uridine-3'-phosphate
  modified_base 19: mod_base = OTHER; note = 2'-O-methyl-guanosine-3'-phosphorothioate
  modified_base 20: mod_base = OTHER; note = 2'-O-methyl-uridine-3'-phosphorothioate
  modified_base 21: mod_base = OTHER; note = 2'-O-methyl-uridine-3'-phosphate
tatacttggtgaagacctgtt

SEQ ID NO: 2065 - RNA, 21 nt, synthetic construct
  source 1..21: mol_type = other RNA
  modified_base 1: mod_base = OTHER; note = 2'-O-methyl-uridine-3'-phosphorothioate
  modified_base 2: mod_base = OTHER; note = 2'-deoxy-2'-fluoro-guanosine-3'-phosphorothioate
  modified_base 3: mod_base = OTHER; note = 2'-O-methyl-adenosine-3'-phosphate
  modified_base 4: mod_base = OTHER; note = 2'-O-methyl-uridine-3'-phosphate
  modified_base 5: mod_base = OTHER; note = 2'-O-methyl-adenosine-3'-phosphate
  modified_base 6: mod_base = OTHER; note = 2'-deoxy-2'-fluoro-cytidine-3'-phosphate
  modified_base 7: mod_base = OTHER; note = 2'-O-methyl-uridine-3'-phosphate
  modified_base 8: mod_base = OTHER; note = 2'-deoxy-2'-fluoro-uridine-3'-phosphate
  modified_base 9: mod_base = OTHER; note = 2'-deoxy-2'-fluoro-guanosine-3'-phosphate
  modified_base 10: mod_base = OTHER; note = 2'-O-methyl-guanosine-3'-phosphate
  modified_base 11: mod_base = OTHER; note = 2'-O-methyl-uridine-3'-phosphate
  modified_base 12: mod_base = OTHER; note = 2'-O-methyl-guanosine-3'-phosphate
  modified_base 13: mod_base = OTHER; note = 2'-O-methyl-adenosine-3'-phosphate
  modified_base 14: mod_base = OTHER; note = 2'-deoxy-2'-fluoro-adenosine-3'-phosphate
  modified_base 15: mod_base = OTHER; note = 2'-O-methyl-guanosine-3'-phosphate
  modified_base 16: mod_base = OTHER; note = 2'-deoxy-2'-fluoro-adenosine-3'-phosphate
  modified_base 17: mod_base = OTHER; note = 2'-O-methyl-cytidine-3'-phosphate
  modified_base 18: mod_base = OTHER; note = 2'-O-methyl-cytidine-3'-phosphate
  modified_base 19: mod_base = OTHER; note = 2'-O-methyl-uridine-3'-phosphorothioate
  modified_base 20: mod_base = OTHER; note = 2'-O-methyl-uridine-3'-phosphorothioate
  modified_base 21: mod_base = OTHER; note = 2'-O-methyl-uridine-3'-phosphate
tgatacttggtgaagaccttt

SEQ ID NO: 2066 - RNA, 21 nt, synthetic construct
  source 1..21: mol_type = other RNA
  modified_base 1: mod_base = OTHER; note = 2'-O-methyl-uridine-3'-phosphorothioate
  modified_base 2: mod_base = OTHER; note = 2'-deoxy-2'-fluoro-uridine-3'-phosphorothioate
  modified_base 3: mod_base = OTHER; note = 2'-O-methyl-guanosine-3'-phosphate
  modified_base 4: mod_base = OTHER; note = 2'-O-methyl-adenosine-3'-phosphate
  modified_base 5: mod_base = OTHER; note = 2'-O-methyl-adenosine-3'-phosphate
  modified_base 6: mod_base = OTHER; note = 2'-deoxy-2'-fluoro-uridine-3'-phosphate
  modified_base 7: mod_base = OTHER; note = 2'-O-methyl-adenosine-3'-phosphate
  modified_base 8: mod_base = OTHER; note = 2'-deoxy-2'-fluoro-adenosine-3'-phosphate
  modified_base 9: mod_base = OTHER; note = 2'-deoxy-2'-fluoro-uridine-3'-phosphate
  modified_base 10: mod_base = OTHER; note = 2'-O-methyl-guanosine-3'-phosphate
  modified_base 11: mod_base = OTHER; note = 2'-O-methyl-adenosine-3'-phosphate
  modified_base 12: mod_base = OTHER; note = 2'-O-methyl-cytidine-3'-phosphate
  modified_base 13: mod_base = OTHER; note = 2'-O-methyl-adenosine-3'-phosphate
  modified_base 14: mod_base = OTHER; note = 2'-deoxy-2'-fluoro-cytidine-3'-phosphate
  modified_base 15: mod_base = OTHER; note = 2'-O-methyl-uridine-3'-phosphate
  modified_base 16: mod_base = OTHER; note = 2'-deoxy-2'-fluoro-uridine-3'-phosphate
  modified_base 17: mod_base = OTHER; note = 2'-O-methyl-cytidine-3'-phosphate
  modified_base 18: mod_base = OTHER; note = 2'-O-methyl-adenosine-3'-phosphate
  modified_base 19: mod_base = OTHER; note = 2'-O-methyl-uridine-3'-phosphorothioate
  modified_base 20: mod_base = OTHER; note = 2'-O-methyl-uridine-3'-phosphorothioate
  modified_base 21: mod_base = OTHER; note = 2'-O-methyl-uridine-3'-phosphate
ttgaataatgacacttcattt

SEQ ID NO: 2067 - RNA, 21 nt, synthetic construct
  source 1..21: mol_type = other RNA
  modified_base 1: mod_base = OTHER; note = 2'-O-methyl-uridine-3'-phosphorothioate
  modified_base 2: mod_base = OTHER; note = 2'-deoxy-2'-fluoro-adenosine-3'-phosphorothioate
  modified_base 3: mod_base = OTHER; note = 2'-O-methyl-guanosine-3'-phosphate
  modified_base 4: mod_base = OTHER; note = 2'-O-methyl-adenosine-3'-phosphate
  modified_base 5: mod_base = OTHER; note = 2'-O-methyl-uridine-3'-phosphate
  modified_base 6: mod_base = OTHER; note = 2'-deoxy-2'-fluoro-guanosine-3'-phosphate
  modified_base 7: mod_base = OTHER; note = 2'-O-methyl-uridine-3'-phosphate
  modified_base 8: mod_base = OTHER; note = 2'-deoxy-2'-fluoro-guanosine-3'-phosphate
  modified_base 9: mod_base = OTHER; note = 2'-deoxy-2'-fluoro-adenosine-3'-phosphate
  modified_base 10: mod_base = OTHER; note = 2'-O-methyl-guanosine-3'-phosphate
  modified_base 11: mod_base = OTHER; note = 2'-O-methyl-guanosine-3'-phosphate
  modified_base 12: mod_base = OTHER; note = 2'-O-methyl-adenosine-3'-phosphate
  modified_base 13: mod_base = OTHER; note = 2'-O-methyl-guanosine-3'-phosphate
  modified_base 14: mod_base = OTHER; note = 2'-deoxy-2'-fluoro-uridine-3'-phosphate
  modified_base 15: mod_base = OTHER; note = 2'-O-methyl-cytidine-3'-phosphate
  modified_base 16: mod_base = OTHER; note = 2'-deoxy-2'-fluoro-adenosine-3'-phosphate
  modified_base 17: mod_base = OTHER; note = 2'-O-methyl-guanosine-3'-phosphate
  modified_base 18: mod_base = OTHER; note = 2'-O-methyl-uridine-3'-phosphate
  modified_base 19: mod_base = OTHER; note = 2'-O-methyl-guanosine-3'-phosphorothioate
  modified_base 20: mod_base = OTHER; note = 2'-O-methyl-uridine-3'-phosphorothioate
  modified_base 21: mod_base = OTHER; note = 2'-O-methyl-uridine-3'-phosphate
tagatgtgaggagtcagtgtt

SEQ ID NO: 2068 - RNA, 21 nt, synthetic construct
  source 1..21: mol_type = other RNA
  modified_base 1: mod_base = OTHER; note = 2'-O-methyl-uridine-3'-phosphorothioate
  modified_base 2: mod_base = OTHER; note = 2'-deoxy-2'-fluoro-guanosine-3'-phosphorothioate
  modified_base 3: mod_base = OTHER; note = 2'-O-methyl-uridine-3'-phosphate
  modified_base 4: mod_base = OTHER; note = 2'-O-methyl-uridine-3'-phosphate
  modified_base 5: mod_base = OTHER; note = 2'-O-methyl-adenosine-3'-phosphate
  modified_base 6: mod_base = OTHER; note = 2'-deoxy-2'-fluoro-adenosine-3'-phosphate
  modified_base 7: mod_base = OTHER; note = 2'-O-methyl-uridine-3'-phosphate
  modified_base 8: mod_base = OTHER; note = 2'-deoxy-2'-fluoro-guanosine-3'-phosphate
  modified_base 9: mod_base = OTHER; note = 2'-deoxy-2'-fluoro-uridine-3'-phosphate
  modified_base 10: mod_base = OTHER; note = 2'-O-methyl-guanosine-3'-phosphate
  modified_base 11: mod_base = OTHER; note = 2'-O-methyl-guanosine-3'-phosphate
  modified_base 12: mod_base = OTHER; note = 2'-O-methyl-cytidine-3'-phosphate
  modified_base 13: mod_base = OTHER; note = 2'-O-methyl-adenosine-3'-phosphate
  modified_base 14: mod_base = OTHER; note = 2'-deoxy-2'-fluoro-uridine-3'-phosphate
  modified_base 15: mod_base = OTHER; note = 2'-O-methyl-adenosine-3'-phosphate
  modified_base 16: mod_base = OTHER; note = 2'-deoxy-2'-fluoro-guanosine-3'-phosphate
  modified_base 17: mod_base = OTHER; note = 2'-O-methyl-adenosine-3'-phosphate
  modified_base 18: mod_base = OTHER; note = 2'-O-methyl-adenosine-3'-phosphate
  modified_base 19: mod_base = OTHER; note = 2'-O-methyl-adenosine-3'-phosphorothioate
  modified_base 20: mod_base = OTHER; note = 2'-O-methyl-uridine-3'-phosphorothioate
  modified_base 21: mod_base = OTHER; note = 2'-O-methyl-uridine-3'-phosphate
tgttaatgtggcatagaaatt

SEQ ID NO: 2069 - RNA, 21 nt, synthetic construct
  source 1..21: mol_type = other RNA
  modified_base 1: mod_base = OTHER; note = 2'-O-methyl-uridine-3'-phosphorothioate
  modified_base 2: mod_base = OTHER; note = 2'-deoxy-2'-fluoro-adenosine-3'-phosphorothioate
  modified_base 3: mod_base = OTHER; note = 2'-O-methyl-uridine-3'-phosphate
  modified_base 4: mod_base = OTHER; note = 2'-O-methyl-uridine-3'-phosphate
  modified_base 5: mod_base = OTHER; note = 2'-O-methyl-guanosine-3'-phosphate
  modified_base 6: mod_base = OTHER; note = 2'-deoxy-2'-fluoro-uridine-3'-phosphate
  modified_base 7: mod_base = OTHER; note = 2'-O-methyl-guanosine-3'-phosphate
  modified_base 8: mod_base = OTHER; note = 2'-deoxy-2'-fluoro-uridine-3'-phosphate
  modified_base 9: mod_base = OTHER; note = 2'-deoxy-2'-fluoro-uridine-3'-phosphate
  modified_base 10: mod_base = OTHER; note = 2'-O-methyl-guanosine-3'-phosphate
  modified_base 11: mod_base = OTHER; note = 2'-O-methyl-uridine-3'-phosphate
  modified_base 12: mod_base = OTHER; note = 2'-O-methyl-adenosine-3'-phosphate
  modified_base 13: mod_base = OTHER; note = 2'-O-methyl-uridine-3'-phosphate
  modified_base 14: mod_base = OTHER; note = 2'-deoxy-2'-fluoro-guanosine-3'-phosphate
  modified_base 15: mod_base = OTHER; note = 2'-O-methyl-adenosine-3'-phosphate
  modified_base 16: mod_base = OTHER; note = 2'-deoxy-2'-fluoro-adenosine-3'-phosphate
  modified_base 17: mod_base = OTHER; note = 2'-O-methyl-guanosine-3'-phosphate
  modified_base 18: mod_base = OTHER; note = 2'-O-methyl-uridine-3'-phosphate
  modified_base 19: mod_base = OTHER; note = 2'-O-methyl-cytidine-3'-phosphorothioate
  modified_base 20: mod_base = OTHER; note = 2'-O-methyl-uridine-3'-phosphorothioate
  modified_base 21: mod_base = OTHER; note = 2'-O-methyl-uridine-3'-phosphate
tattgtgttgtatgaagtctt

SEQ ID NO: 2070 - RNA, 21 nt, synthetic construct
  source 1..21: mol_type = other RNA
  modified_base 1: mod_base = OTHER; note = 2'-O-methyl-uridine-3'-phosphorothioate
  modified_base 2: mod_base = OTHER; note = 2'-deoxy-2'-fluoro-adenosine-3'-phosphorothioate
  modified_base 3: mod_base = OTHER; note = 2'-O-methyl-guanosine-3'-phosphate
  modified_base 4: mod_base = OTHER; note = 2'-O-methyl-adenosine-3'-phosphate
  modified_base 5: mod_base = OTHER; note = 2'-O-methyl-guanosine-3'-phosphate
  modified_base 6: mod_base = OTHER; note = 2'-deoxy-2'-fluoro-uridine-3'-phosphate
  modified_base 7: mod_base = OTHER; note = 2'-O-methyl-adenosine-3'-phosphate
  modified_base 8: mod_base = OTHER; note = 2'-deoxy-2'-fluoro-uridine-3'-phosphate
  modified_base 9: mod_base = OTHER; note = 2'-deoxy-2'-fluoro-uridine-3'-phosphate
  modified_base 10: mod_base = OTHER; note = 2'-O-methyl-guanosine-3'-phosphate
  modified_base 11: mod_base = OTHER; note = 2'-O-methyl-uridine-3'-phosphate
  modified_base 12: mod_base = OTHER; note = 2'-O-methyl-guanosine-3'-phosphate
  modified_base 13: mod_base = OTHER; note = 2'-O-methyl-uridine-3'-phosphate
  modified_base 14: mod_base = OTHER; note = 2'-deoxy-2'-fluoro-uridine-3'-phosphate
  modified_base 15: mod_base = OTHER; note = 2'-O-methyl-guanosine-3'-phosphate
  modified_base 16: mod_base = OTHER; note = 2'-deoxy-2'-fluoro-uridine-3'-phosphate
  modified_base 17: mod_base = OTHER; note = 2'-O-methyl-adenosine-3'-phosphate
  modified_base 18: mod_base = OTHER; note = 2'-O-methyl-uridine-3'-phosphate
  modified_base 19: mod_base = OTHER; note = 2'-O-methyl-guanosine-3'-phosphorothioate
  modified_base 20: mod_base = OTHER; note = 2'-O-methyl-uridine-3'-phosphorothioate
  modified_base 21: mod_base = OTHER; note = 2'-O-methyl-uridine-3'-phosphate
tagagtattgtgttgtatgtt

SEQ ID NO: 2071 - RNA, 21 nt, synthetic construct
  source 1..21: mol_type = other RNA
  modified_base 1: mod_base = OTHER; note = 2'-O-methyl-uridine-3'-phosphorothioate
  modified_base 2: mod_base = OTHER; note = 2'-deoxy-2'-fluoro-uridine-3'-phosphorothioate
  modified_base 3: mod_base = OTHER; note = 2'-O-methyl-adenosine-3'-phosphate
  modified_base 4: mod_base = OTHER; note = 2'-O-methyl-guanosine-3'-phosphate
  modified_base 5: mod_base = OTHER; note = 2'-O-methyl-adenosine-3'-phosphate
  modified_base 6: mod_base = OTHER; note = 2'-deoxy-2'-fluoro-guanosine-3'-phosphate
  modified_base 7: mod_base = OTHER; note = 2'-O-methyl-uridine-3'-phosphate
  modified_base 8: mod_base = OTHER; note = 2'-deoxy-2'-fluoro-adenosine-3'-phosphate
  modified_base 9: mod_base = OTHER; note = 2'-deoxy-2'-fluoro-uridine-3'-phosphate
  modified_base 10: mod_base = OTHER; note = 2'-O-methyl-uridine-3'-phosphate
  modified_base 11: mod_base = OTHER; note = 2'-O-methyl-guanosine-3'-phosphate
  modified_base 12: mod_base = OTHER; note = 2'-O-methyl-uridine-3'-phosphate
  modified_base 13: mod_base = OTHER; note = 2'-O-methyl-guanosine-3'-phosphate
  modified_base 14: mod_base = OTHER; note = 2'-deoxy-2'-fluoro-uridine-3'-phosphate
  modified_base 15: mod_base = OTHER; note = 2'-O-methyl-uridine-3'-phosphate
  modified_base 16: mod_base = OTHER; note = 2'-deoxy-2'-fluoro-guanosine-3'-phosphate
  modified_base 17: mod_base = OTHER; note = 2'-O-methyl-uridine-3'-phosphate
  modified_base 18: mod_base = OTHER; note = 2'-O-methyl-adenosine-3'-phosphate
  modified_base 19: mod_base = OTHER; note = 2'-O-methyl-uridine-3'-phosphorothioate
  modified_base 20: mod_base = OTHER; note = 2'-O-methyl-uridine-3'-phosphorothioate
  modified_base 21: mod_base = OTHER; note = 2'-O-methyl-uridine-3'-phosphate
ttagagtattgtgttgtattt

SEQ ID NO: 2072 - RNA, 21 nt, synthetic construct
  source 1..21: mol_type = other RNA
  modified_base 1: mod_base = OTHER; note = 2'-O-methyl-uridine-3'-phosphorothioate
  modified_base 2: mod_base = OTHER; note = 2'-deoxy-2'-fluoro-uridine-3'-phosphorothioate
  modified_base 3: mod_base = OTHER; note = 2'-O-methyl-adenosine-3'-phosphate
  modified_base 4: mod_base = OTHER; note = 2'-O-methyl-uridine-3'-phosphate
  modified_base 5: mod_base = OTHER; note = 2'-O-methyl-guanosine-3'-phosphate
  modified_base 6: mod_base = OTHER; note = 2'-deoxy-2'-fluoro-adenosine-3'-phosphate
  modified_base 7: mod_base = OTHER; note = 2'-O-methyl-guanosine-3'-phosphate
  modified_base 8: mod_base = OTHER; note = 2'-deoxy-2'-fluoro-adenosine-3'-phosphate
  modified_base 9: mod_base = OTHER; note = 2'-deoxy-2'-fluoro-uridine-3'-phosphate
  modified_base 10: mod_base = OTHER; note = 2'-O-methyl-adenosine-3'-phosphate
  modified_base 11: mod_base = OTHER; note = 2'-O-methyl-adenosine-3'-phosphate
  modified_base 12: mod_base = OTHER; note = 2'-O-methyl-cytidine-3'-phosphate
  modified_base 13: mod_base = OTHER; note = 2'-O-methyl-uridine-3'-phosphate
  modified_base 14: mod_base = OTHER; note = 2'-deoxy-2'-fluoro-guanosine-3'-phosphate
  modified_base 15: mod_base = OTHER; note = 2'-O-methyl-uridine-3'-phosphate
  modified_base 16: mod_base = OTHER; note = 2'-deoxy-2'-fluoro-cytidine-3'-phosphate
  modified_base 17: mod_base = OTHER; note = 2'-O-methyl-uridine-3'-phosphate
  modified_base 18: mod_base = OTHER; note = 2'-O-methyl-uridine-3'-phosphate
  modified_base 19: mod_base = OTHER; note = 2'-O-methyl-cytidine-3'-phosphorothioate
  modified_base 20: mod_base = OTHER; note = 2'-O-methyl-uridine-3'-phosphorothioate
  modified_base 21: mod_base = OTHER; note = 2'-O-methyl-uridine-3'-phosphate
ttatgagataactgtcttctt

SEQ ID NO: 2073 - RNA, 21 nt, synthetic construct
  source 1..21: mol_type = other RNA
  modified_base 1: mod_base = OTHER; note = 2'-O-methyl-uridine-3'-phosphorothioate
  modified_base 2: mod_base = OTHER; note = 2'-deoxy-2'-fluoro-adenosine-3'-phosphorothioate
  modified_base 3: mod_base = OTHER; note = 2'-O-methyl-uridine-3'-phosphate
  modified_base 4: mod_base = OTHER; note = 2'-O-methyl-adenosine-3'-phosphate
  modified_base 5: mod_base = OTHER; note = 2'-O-methyl-uridine-3'-phosphate
  modified_base 6: mod_base = OTHER; note = 2'-deoxy-2'-fluoro-guanosine-3'-phosphate
  modified_base 7: mod_base = OTHER; note = 2'-O-methyl-adenosine-3'-phosphate
  modified_base 8: mod_base = OTHER; note = 2'-deoxy-2'-fluoro-guanosine-3'-phosphate
  modified_base 9: mod_base = OTHER; note = 2'-deoxy-2'-fluoro-adenosine-3'-phosphate
  modified_base 10: mod_base = OTHER; note = 2'-O-methyl-uridine-3'-phosphate
  modified_base 11: mod_base = OTHER; note = 2'-O-methyl-adenosine-3'-phosphate
  modified_base 12: mod_base = OTHER; note = 2'-O-methyl-adenosine-3'-phosphate
  modified_base 13: mod_base = OTHER; note = 2'-O-methyl-cytidine-3'-phosphate
  modified_base 14: mod_base = OTHER; note = 2'-deoxy-2'-fluoro-uridine-3'-phosphate
  modified_base 15: mod_base = OTHER; note = 2'-O-methyl-guanosine-3'-phosphate
  modified_base 16: mod_base = OTHER; note = 2'-deoxy-2'-fluoro-uridine-3'-phosphate
  modified_base 17: mod_base = OTHER; note = 2'-O-methyl-cytidine-3'-phosphate
  modified_base 18: mod_base = OTHER; note = 2'-O-methyl-uridine-3'-phosphate
  modified_base 19: mod_base = OTHER; note = 2'-O-methyl-uridine-3'-phosphorothioate
  modified_base 20: mod_base = OTHER; note = 2'-O-methyl-uridine-3'-phosphorothioate
  modified_base 21: mod_base = OTHER; note = 2'-O-methyl-uridine-3'-phosphate
tatatgagataactgtctttt

SEQ ID NO: 2074 - RNA, 21 nt, synthetic construct
  source 1..21: mol_type = other RNA
  modified_base 1: mod_base = OTHER; note = 2'-O-methyl-uridine-3'-phosphorothioate
  modified_base 2: mod_base = OTHER; note = 2'-deoxy-2'-fluoro-cytidine-3'-phosphorothioate
  modified_base 3: mod_base = OTHER; note = 2'-O-methyl-adenosine-3'-phosphate
  modified_base 4: mod_base = OTHER; note = 2'-O-methyl-adenosine-3'-phosphate
  modified_base 5: mod_base = OTHER; note = 2'-O-methyl-adenosine-3'-phosphate
  modified_base 6: mod_base = OTHER; note = 2'-deoxy-2'-fluoro-uridine-3'-phosphate
  modified_base 7: mod_base = OTHER; note = 2'-O-methyl-adenosine-3'-phosphate
  modified_base 8: mod_base = OTHER; note = 2'-deoxy-2'-fluoro-uridine-3'-phosphate
  modified_base 9: mod_base = OTHER; note = 2'-deoxy-2'-fluoro-guanosine-3'-phosphate
  modified_base 10: mod_base = OTHER; note = 2'-O-methyl-adenosine-3'-phosphate
  modified_base 11: mod_base = OTHER; note = 2'-O-methyl-guanosine-3'-phosphate
  modified_base 12: mod_base = OTHER; note = 2'-O-methyl-adenosine-3'-phosphate
  modified_base 13: mod_base = OTHER; note = 2'-O-methyl-uridine-3'-phosphate
  modified_base 14: mod_base = OTHER; note = 2'-deoxy-2'-fluoro-adenosine-3'-phosphate
  modified_base 15: mod_base = OTHER; note = 2'-O-methyl-adenosine-3'-phosphate
  modified_base 16: mod_base = OTHER; note = 2'-deoxy-2'-fluoro-cytidine-3'-phosphate
  modified_base 17: mod_base = OTHER; note = 2'-O-methyl-uridine-3'-phosphate
  modified_base 18: mod_base = OTHER; note = 2'-O-methyl-guanosine-3'-phosphate
  modified_base 19: mod_base = OTHER; note = 2'-O-methyl-uridine-3'-phosphorothioate
  modified_base 20: mod_base = OTHER; note = 2'-O-methyl-uridine-3'-phosphorothioate
  modified_base 21: mod_base = OTHER; note = 2'-O-methyl-uridine-3'-phosphate
tcaaatatgagataactgttt

SEQ ID NO: 2075 - RNA, 21 nt, synthetic construct
  source 1..21: mol_type = other RNA
  modified_base 1: mod_base = OTHER; note = 2'-O-methyl-uridine-3'-phosphorothioate
  modified_base 2: mod_base = OTHER; note = 2'-deoxy-2'-fluoro-guanosine-3'-phosphorothioate
  modified_base 3: mod_base = OTHER; note = 2'-O-methyl-cytidine-3'-phosphate
  modified_base 4: mod_base = OTHER; note = 2'-O-methyl-cytidine-3'-phosphate
  modified_base 5: mod_base = OTHER; note = 2'-O-methyl-adenosine-3'-phosphate
  modified_base 6: mod_base = OTHER; note = 2'-deoxy-2'-fluoro-adenosine-3'-phosphate
  modified_base 7: mod_base = OTHER; note = 2'-O-methyl-adenosine-3'-phosphate
  modified_base 8: mod_base = OTHER; note = 2'-deoxy-2'-fluoro-uridine-3'-phosphate
  modified_base 9: mod_base = OTHER; note = 2'-deoxy-2'-fluoro-adenosine-3'-phosphate
  modified_base 10: mod_base = OTHER; note = 2'-O-methyl-uridine-3'-phosphate
  modified_base 11: mod_base = OTHER; note = 2'-O-methyl-guanosine-3'-phosphate
  modified_base 12: mod_base = OTHER; note = 2'-O-methyl-adenosine-3'-phosphate
  modified_base 13: mod_base = OTHER; note = 2'-O-methyl-guanosine-3'-phosphate
  modified_base 14: mod_base = OTHER; note = 2'-deoxy-2'-fluoro-adenosine-3'-phosphate
  modified_base 15: mod_base = OTHER; note = 2'-O-methyl-uridine-3'-phosphate
  modified_base 16: mod_base = OTHER; note = 2'-deoxy-2'-fluoro-adenosine-3'-phosphate
  modified_base 17: mod_base = OTHER; note = 2'-O-methyl-adenosine-3'-phosphate
  modified_base 18: mod_base = OTHER; note = 2'-O-methyl-cytidine-3'-phosphate
  modified_base 19: mod_base = OTHER; note = 2'-O-methyl-uridine-3'-phosphorothioate
  modified_base 20: mod_base = OTHER; note = 2'-O-methyl-uridine-3'-phosphorothioate
  modified_base 21: mod_base = OTHER; note = 2'-O-methyl-uridine-3'-phosphate
tgccaaatatgagataacttt

SEQ ID NO: 2076 - RNA, 21 nt, synthetic construct
  source 1..21: mol_type = other RNA
  modified_base 1: mod_base = OTHER; note = 2'-O-methyl-uridine-3'-phosphorothioate
  modified_base 2: mod_base = OTHER; note = 2'-deoxy-2'-fluoro-guanosine-3'-phosphorothioate
  modified_base 3: mod_base = OTHER; note = 2'-O-methyl-uridine-3'-phosphate
  modified_base 4: mod_base = OTHER; note = 2'-O-methyl-adenosine-3'-phosphate
  modified_base 5: mod_base = OTHER; note = 2'-O-methyl-uridine-3'-phosphate
  modified_base 6: mod_base = OTHER; note = 2'-deoxy-2'-fluoro-uridine-3'-phosphate
  modified_base 7: mod_base = OTHER; note = 2'-O-methyl-guanosine-3'-phosphate
  modified_base 8: mod_base = OTHER; note = 2'-deoxy-2'-fluoro-guanosine-3'-phosphate
  modified_base 9: mod_base = OTHER; note = 2'-deoxy-2'-fluoro-adenosine-3'-phosphate
  modified_base 10: mod_base = OTHER; note = 2'-O-methyl-cytidine-3'-phosphate
  modified_base 11: mod_base = OTHER; note = 2'-O-methyl-uridine-3'-phosphate
  modified_base 12: mod_base = OTHER; note = 2'-O-methyl-uridine-3'-phosphate
  modified_base 13: mod_base = OTHER; note = 2'-O-methyl-uridine-3'-phosphate
  modified_base 14: mod_base = OTHER; note = 2'-deoxy-2'-fluoro-cytidine-3'-phosphate
  modified_base 15: mod_base = OTHER; note = 2'-O-methyl-uridine-3'-phosphate
  modified_base 16: mod_base = OTHER; note = 2'-deoxy-2'-fluoro-cytidine-3'-phosphate
  modified_base 17: mod_base = OTHER; note = 2'-O-methyl-cytidine-3'-phosphate
  modified_base 18: mod_base = OTHER; note = 2'-O-methyl-adenosine-3'-phosphate
  modified_base 19: mod_base = OTHER; note = 2'-O-methyl-uridine-3'-phosphorothioate
  modified_base 20: mod_base = OTHER; note = 2'-O-methyl-uridine-3'-phosphorothioate
  modified_base 21: mod_base = OTHER; note = 2'-O-methyl-uridine-3'-phosphate
tgtattggactttctccattt

SEQ ID NO: 2077 - RNA, 21 nt, synthetic construct
  source 1..21: mol_type = other RNA
  modified_base 1: mod_base = OTHER; note = 2'-O-methyl-uridine-3'-phosphorothioate
  modified_base 2: mod_base = OTHER; note = 2'-deoxy-2'-fluoro-adenosine-3'-phosphorothioate
  modified_base 3: mod_base = OTHER; note = 2'-O-methyl-adenosine-3'-phosphate
  modified_base 4: mod_base = OTHER; note = 2'-O-methyl-uridine-3'-phosphate
  modified_base 5: mod_base = OTHER; note = 2'-O-methyl-guanosine-3'-phosphate
  modified_base 6: mod_base = OTHER; note = 2'-deoxy-2'-fluoro-guanosine-3'-phosphate
  modified_base 7: mod_base = OTHER; note = 2'-O-methyl-uridine-3'-phosphate
  modified_base 8: mod_base = OTHER; note = 2'-deoxy-2'-fluoro-uridine-3'-phosphate
  modified_base 9: mod_base = OTHER; note = 2'-deoxy-2'-fluoro-guanosine-3'-phosphate
  modified_base 10: mod_base = OTHER; note = 2'-O-methyl-adenosine-3'-phosphate
  modified_base 11: mod_base = OTHER; note = 2'-O-methyl-guanosine-3'-phosphate
  modified_base 12: mod_base = OTHER; note = 2'-O-methyl-guanosine-3'-phosphate
  modified_base 13: mod_base = OTHER; note = 2'-O-methyl-cytidine-3'-phosphate
  modified_base 14: mod_base = OTHER; note = 2'-deoxy-2'-fluoro-uridine-3'-phosphate
  modified_base 15: mod_base = OTHER; note = 2'-O-methyl-cytidine-3'-phosphate
  modified_base 16: mod_base = OTHER; note = 2'-deoxy-2'-fluoro-uridine-3'-phosphate
  modified_base 17: mod_base = OTHER; note = 2'-O-methyl-uridine-3'-phosphate
  modified_base 18: mod_base = OTHER; note = 2'-O-methyl-cytidine-3'-phosphate
  modified_base 19: mod_base = OTHER; note = 2'-O-methyl-uridine-3'-phosphorothioate
  modified_base 20: mod_base = OTHER; note = 2'-O-methyl-uridine-3'-phosphorothioate
  modified_base 21: mod_base = OTHER; note = 2'-O-methyl-uridine-3'-phosphate
taatggttgaggctcttcttt

SEQ ID NO: 2078 - RNA, 21 nt, synthetic construct
  source 1..21: mol_type = other RNA
  modified_base 1: mod_base = OTHER; note = 2'-O-methyl-uridine-3'-phosphorothioate
  modified_base 2: mod_base = OTHER; note = 2'-deoxy-2'-fluoro-cytidine-3'-phosphorothioate
  modified_base 3: mod_base = OTHER; note = 2'-O-methyl-adenosine-3'-phosphate
  modified_base 4: mod_base = OTHER; note = 2'-O-methyl-adenosine-3'-phosphate
  modified_base 5: mod_base = OTHER; note = 2'-O-methyl-uridine-3'-phosphate
  modified_base 6: mod_base = OTHER; note = 2'-deoxy-2'-fluoro-guanosine-3'-phosphate
  modified_base 7: mod_base = OTHER; note = 2'-O-methyl-guanosine-3'-phosphate
  modified_base 8: mod_base = OTHER; note = 2'-deoxy-2'-fluoro-uridine-3'-phosphate
  modified_base 9: mod_base = OTHER; note = 2'-deoxy-2'-fluoro-uridine-3'-phosphate
  modified_base 10: mod_base = OTHER; note = 2'-O-methyl-guanosine-3'-phosphate
  modified_base 11: mod_base = OTHER; note = 2'-O-methyl-adenosine-3'-phosphate
  modified_base 12: mod_base = OTHER; note = 2'-O-methyl-guanosine-3'-phosphate
  modified_base 13: mod_base = OTHER; note = 2'-O-methyl-guanosine-3'-phosphate
  modified_base 14: mod_base = OTHER; note = 2'-deoxy-2'-fluoro-cytidine-3'-phosphate
  modified_base 15: mod_base = OTHER; note = 2'-O-methyl-uridine-3'-phosphate
  modified_base 16: mod_base = OTHER; note = 2'-deoxy-2'-fluoro-cytidine-3'-phosphate
  modified_base 17: mod_base = OTHER; note = 2'-O-methyl-uridine-3'-phosphate
  modified_base 18: mod_base = OTHER; note = 2'-O-methyl-uridine-3'-phosphate
  modified_base 19: mod_base = OTHER; note = 2'-O-methyl-cytidine-3'-phosphorothioate
  modified_base 20: mod_base = OTHER; note = 2'-O-methyl-uridine-3'-phosphorothioate
  modified_base 21: mod_base = OTHER; note = 2'-O-methyl-uridine-3'-phosphate
tcaatggttgaggctcttctt

SEQ ID NO: 2079 - RNA, 21 nt, synthetic construct
  source 1..21: mol_type = other RNA
  modified_base 1: mod_base = OTHER; note = 2'-O-methyl-uridine-3'-phosphorothioate
  modified_base 2: mod_base = OTHER; note = 2'-deoxy-2'-fluoro-uridine-3'-phosphorothioate
  modified_base 3: mod_base = OTHER; note = 2'-O-methyl-cytidine-3'-phosphate
  modified_base 4: mod_base = OTHER; note = 2'-O-methyl-adenosine-3'-phosphate
  modified_base 5: mod_base = OTHER; note = 2'-O-methyl-adenosine-3'-phosphate
  modified_base 6: mod_base = OTHER; note = 2'-deoxy-2'-fluoro-uridine-3'-phosphate
  modified_base 7: mod_base = OTHER; note = 2'-O-methyl-guanosine-3'-phosphate
  modified_base 8: mod_base = OTHER; note = 2'-deoxy-2'-fluoro-guanosine-3'-phosphate
  modified_base 9: mod_base = OTHER; note = 2'-deoxy-2'-fluoro-uridine-3'-phosphate
  modified_base 10: mod_base = OTHER; note = 2'-O-methyl-uridine-3'-phosphate
  modified_base 11: mod_base = OTHER; note = 2'-O-methyl-guanosine-3'-phosphate
  modified_base 12: mod_base = OTHER; note = 2'-O-methyl-adenosine-3'-phosphate
  modified_base 13: mod_base = OTHER; note = 2'-O-methyl-guanosine-3'-phosphate
  modified_base 14: mod_base = OTHER; note = 2'-deoxy-2'-fluoro-guanosine-3'-phosphate
  modified_base 15: mod_base = OTHER; note = 2'-O-methyl-cytidine-3'-phosphate
  modified_base 16: mod_base = OTHER; note = 2'-deoxy-2'-fluoro-uridine-3'-phosphate
  modified_base 17: mod_base = OTHER; note = 2'-O-methyl-cytidine-3'-phosphate
  modified_base 18: mod_base = OTHER; note = 2'-O-methyl-uridine-3'-phosphate
  modified_base 19: mod_base = OTHER; note = 2'-O-methyl-uridine-3'-phosphorothioate
  modified_base 20: mod_base = OTHER; note = 2'-O-methyl-uridine-3'-phosphorothioate
  modified_base 21: mod_base = OTHER; note = 2'-O-methyl-uridine-3'-phosphate
ttcaatggttgaggctctttt

SEQ ID NO: 2080 - RNA, 21 nt, synthetic construct
  source 1..21: mol_type = other RNA
  modified_base 1: mod_base = OTHER; note = 2'-O-methyl-uridine-3'-phosphorothioate
  modified_base 2: mod_base = OTHER; note = 2'-deoxy-2'-fluoro-uridine-3'-phosphorothioate
  modified_base 3: mod_base = OTHER; note = 2'-O-methyl-uridine-3'-phosphate
  modified_base 4: mod_base = OTHER; note = 2'-O-methyl-cytidine-3'-phosphate
  modified_base 5: mod_base = OTHER; note = 2'-O-methyl-adenosine-3'-phosphate
  modified_base 6: mod_base = OTHER; note = 2'-deoxy-2'-fluoro-adenosine-3'-phosphate
  modified_base 7: mod_base = OTHER; note = 2'-O-methyl-uridine-3'-phosphate
  modified_base 8: mod_base = OTHER; note = 2'-deoxy-2'-fluoro-guanosine-3'-phosphate
  modified_base 9: mod_base = OTHER; note = 2'-deoxy-2'-fluoro-guanosine-3'-phosphate
  modified_base 10: mod_base = OTHER; note = 2'-O-methyl-uridine-3'-phosphate
  modified_base 11: mod_base = OTHER; note = 2'-O-methyl-uridine-3'-phosphate
  modified_base 12: mod_base = OTHER; note = 2'-O-methyl-guanosine-3'-phosphate
  modified_base 13: mod_base = OTHER; note = 2'-O-methyl-adenosine-3'-phosphate
  modified_base 14: mod_base = OTHER; note = 2'-deoxy-2'-fluoro-guanosine-3'-phosphate
  modified_base 15: mod_base = OTHER; note = 2'-O-methyl-guanosine-3'-phosphate
  modified_base 16: mod_base = OTHER; note = 2'-deoxy-2'-fluoro-cytidine-3'-phosphate
  modified_base 17: mod_base = OTHER; note = 2'-O-methyl-uridine-3'-phosphate
  modified_base 18: mod_base = OTHER; note = 2'-O-methyl-cytidine-3'-phosphate
  modified_base 19: mod_base = OTHER; note = 2'-O-methyl-uridine-3'-phosphorothioate
  modified_base 20: mod_base = OTHER; note = 2'-O-methyl-uridine-3'-phosphorothioate
  modified_base 21: mod_base = OTHER; note = 2'-O-methyl-uridine-3'-phosphate
tttcaatggttgaggctcttt

SEQ ID NO: 2081 - RNA, 21 nt, synthetic construct
  source 1..21: mol_type = other RNA
  modified_base 1: mod_base = OTHER; note = 2'-O-methyl-uridine-3'-phosphorothioate
  modified_base 2: mod_base = OTHER; note = 2'-deoxy-2'-fluoro-cytidine-3'-phosphorothioate
  modified_base 3: mod_base = OTHER; note = 2'-O-methyl-adenosine-3'-phosphate
  modified_base 4: mod_base = OTHER; note = 2'-O-methyl-uridine-3'-phosphate
  modified_base 5: mod_base = OTHER; note = 2'-O-methyl-uridine-3'-phosphate
  modified_base 6: mod_base = OTHER; note = 2'-deoxy-2'-fluoro-uridine-3'-phosphate
  modified_base 7: mod_base = OTHER; note = 2'-O-methyl-cytidine-3'-phosphate
  modified_base 8: mod_base = OTHER; note = 2'-deoxy-2'-fluoro-adenosine-3'-phosphate
  modified_base 9: mod_base = OTHER; note = 2'-deoxy-2'-fluoro-adenosine-3'-phosphate
  modified_base 10: mod_base = OTHER; note = 2'-O-methyl-uridine-3'-phosphate
  modified_base 11: mod_base = OTHER; note = 2'-O-methyl-guanosine-3'-phosphate
  modified_base 12: mod_base = OTHER; note = 2'-O-methyl-guanosine-3'-phosphate
  modified_base 13: mod_base = OTHER; note = 2'-O-methyl-uridine-3'-phosphate
  modified_base 14: mod_base = OTHER; note = 2'-deoxy-2'-fluoro-uridine-3'-phosphate
  modified_base 15: mod_base = OTHER; note = 2'-O-methyl-guanosine-3'-phosphate
  modified_base 16: mod_base = OTHER; note = 2'-deoxy-2'-fluoro-adenosine-3'-phosphate
  modified_base 17: mod_base = OTHER; note = 2'-O-methyl-guanosine-3'-phosphate
  modified_base 18: mod_base = OTHER; note = 2'-O-methyl-guanosine-3'-phosphate
  modified_base 19: mod_base = OTHER; note = 2'-O-methyl-cytidine-3'-phosphorothioate
  modified_base 20: mod_base = OTHER; note = 2'-O-methyl-uridine-3'-phosphorothioate
  modified_base 21: mod_base = OTHER; note = 2'-O-methyl-uridine-3'-phosphate
tcatttcaatggttgaggctt

SEQ ID NO: 2082 - RNA, 21 nt, synthetic construct
  source 1..21: mol_type = other RNA
  modified_base 1: mod_base = OTHER; note = 2'-O-methyl-uridine-3'-phosphorothioate
  modified_base 2: mod_base = OTHER; note = 2'-deoxy-2'-fluoro-adenosine-3'-phosphorothioate
  modified_base 3: mod_base = OTHER; note = 2'-O-methyl-guanosine-3'-phosphate
  modified_base 4: mod_base = OTHER; note = 2'-O-methyl-guanosine-3'-phosphate
  modified_base 5: mod_base = OTHER; note = 2'-O-methyl-cytidine-3'-phosphate
  modified_base 6: mod_base = OTHER; note = 2'-deoxy-2'-fluoro-adenosine-3'-phosphate
  modified_base 7: mod_base = OTHER; note = 2'-O-methyl-uridine-3'-phosphate
  modified_base 8: mod_base = OTHER; note = 2'-deoxy-2'-fluoro-uridine-3'-phosphate
  modified_base 9: mod_base = OTHER; note = 2'-deoxy-2'-fluoro-uridine-3'-phosphate
  modified_base 10: mod_base = OTHER; note = 2'-O-methyl-cytidine-3'-phosphate
  modified_base 11: mod_base = OTHER; note = 2'-O-methyl-adenosine-3'-phosphate
  modified_base 12: mod_base = OTHER; note = 2'-O-methyl-adenosine-3'-phosphate
  modified_base 13: mod_base = OTHER; note = 2'-O-methyl-uridine-3'-phosphate
  modified_base 14: mod_base = OTHER; note = 2'-deoxy-2'-fluoro-guanosine-3'-phosphate
  modified_base 15: mod_base = OTHER; note = 2'-O-methyl-guanosine-3'-phosphate
  modified_base 16: mod_base = OTHER; note = 2'-deoxy-2'-fluoro-uridine-3'-phosphate
  modified_base 17: mod_base = OTHER; note = 2'-O-methyl-uridine-3'-phosphate
  modified_base 18: mod_base = OTHER; note = 2'-O-methyl-guanosine-3'-phosphate
  modified_base 19: mod_base = OTHER; note = 2'-O-methyl-adenosine-3'-phosphorothioate
  modified_base 20: mod_base = OTHER; note = 2'-O-methyl-uridine-3'-phosphorothioate
  modified_base 21: mod_base = OTHER; note = 2'-O-methyl-uridine-3'-phosphate
taggcatttcaatggttgatt

SEQ ID NO: 2083 - RNA, 21 nt, synthetic construct
  source 1..21: mol_type = other RNA
  modified_base 1: mod_base = OTHER; note = 2'-O-methyl-uridine-3'-phosphorothioate
  modified_base 2: mod_base = OTHER; note = 2'-deoxy-2'-fluoro-guanosine-3'-phosphorothioate
  modified_base 3: mod_base = OTHER; note = 2'-O-methyl-uridine-3'-phosphate
  modified_base 4: mod_base = OTHER; note = 2'-O-methyl-uridine-3'-phosphate
  modified_base 5: mod_base = OTHER; note = 2'-O-methyl-guanosine-3'-phosphate
  modified_base 6: mod_base = OTHER; note = 2'-deoxy-2'-fluoro-adenosine-3'-phosphate
  modified_base 7: mod_base = OTHER; note = 2'-O-methyl-guanosine-3'-phosphate
  modified_base 8: mod_base = OTHER; note = 2'-deoxy-2'-fluoro-guanosine-3'-phosphate
  modified_base 9: mod_base = OTHER; note = 2'-deoxy-2'-fluoro-cytidine-3'-phosphate
  modified_base 10: mod_base = OTHER; note = 2'-O-methyl-adenosine-3'-phosphate
  modified_base 11: mod_base = OTHER; note = 2'-O-methyl-uridine-3'-phosphate
  modified_base 12: mod_base = OTHER; note = 2'-O-methyl-uridine-3'-phosphate
  modified_base 13: mod_base = OTHER; note = 2'-O-methyl-uridine-3'-phosphate
  modified_base 14: mod_base = OTHER; note = 2'-deoxy-2'-fluoro-cytidine-3'-phosphate
  modified_base 15: mod_base = OTHER; note = 2'-O-methyl-adenosine-3'-phosphate
  modified_base 16: mod_base = OTHER; note = 2'-deoxy-2'-fluoro-adenosine-3'-phosphate
  modified_base 17: mod_base = OTHER; note = 2'-O-methyl-uridine-3'-phosphate
  modified_base 18: mod_base = OTHER; note = 2'-O-methyl-guanosine-3'-phosphate
  modified_base 19: mod_base = OTHER; note = 2'-O-methyl-guanosine-3'-phosphorothioate
  modified_base 20: mod_base = OTHER; note = 2'-O-methyl-uridine-3'-phosphorothioate
  modified_base 21: mod_base = OTHER; note = 2'-O-methyl-uridine-3'-phosphate
tgttgaggcatttcaatggtt

SEQ ID NO: 2084 - RNA, 21 nt, synthetic construct
  source 1..21: mol_type = other RNA
  modified_base 1: mod_base = OTHER; note = 2'-O-methyl-uridine-3'-phosphorothioate
  modified_base 2: mod_base = OTHER; note = 2'-deoxy-2'-fluoro-adenosine-3'-phosphorothioate
  modified_base 3: mod_base = OTHER; note = 2'-O-methyl-uridine-3'-phosphate
  modified_base 4: mod_base = OTHER; note = 2'-O-methyl-uridine-3'-phosphate
  modified_base 5: mod_base = OTHER; note = 2'-O-methyl-adenosine-3'-phosphate
  modified_base 6: mod_base = OTHER; note = 2'-deoxy-2'-fluoro-adenosine-3'-phosphate
  modified_base 7: mod_base = OTHER; note = 2'-O-methyl-guanosine-3'-phosphate
  modified_base 8: mod_base = OTHER; note = 2'-deoxy-2'-fluoro-adenosine-3'-phosphate
  modified_base 9: mod_base = OTHER; note = 2'-deoxy-2'-fluoro-uridine-3'-phosphate
  modified_base 10: mod_base = OTHER; note = 2'-O-methyl-guanosine-3'-phosphate
  modified_base 11: mod_base = OTHER; note = 2'-O-methyl-adenosine-3'-phosphate
  modified_base 12: mod_base = OTHER; note = 2'-O-methyl-guanosine-3'-phosphate
  modified_base 13: mod_base = OTHER; note = 2'-O-methyl-adenosine-3'-phosphate
  modified_base 14: mod_base = OTHER; note = 2'-deoxy-2'-fluoro-cytidine-3'-phosphate
  modified_base 15: mod_base = OTHER; note = 2'-O-methyl-adenosine-3'-phosphate
  modified_base 16: mod_base = OTHER; note = 2'-deoxy-2'-fluoro-guanosine-3'-phosphate
  modified_base 17: mod_base = OTHER; note = 2'-O-methyl-adenosine-3'-phosphate
  modified_base 18: mod_base = OTHER; note = 2'-O-methyl-adenosine-3'-phosphate
  modified_base 19: mod_base = OTHER; note = 2'-O-methyl-adenosine-3'-phosphorothioate
  modified_base 20: mod_base = OTHER; note = 2'-O-methyl-uridine-3'-phosphorothioate
  modified_base 21: mod_base = OTHER; note = 2'-O-methyl-uridine-3'-phosphate
tattaagatgagacagaaatt

SEQ ID NO: 2085 - RNA, 21 nt, synthetic construct
  source 1..21: mol_type = other RNA
  modified_base 1: mod_base = OTHER; note = 2'-O-methyl-uridine-3'-phosphorothioate
  modified_base 2: mod_base = OTHER; note = 2'-deoxy-2'-fluoro-adenosine-3'-phosphorothioate
  modified_base 3: mod_base = OTHER; note = 2'-O-methyl-guanosine-3'-phosphate
  modified_base 4: mod_base = OTHER; note = 2'-O-methyl-adenosine-3'-phosphate
  modified_base 5: mod_base = OTHER; note = 2'-O-methyl-guanosine-3'-phosphate
  modified_base 6: mod_base = OTHER; note = 2'-deoxy-2'-fluoro-adenosine-3'-phosphate
  modified_base 7: mod_base = OTHER; note = 2'-O-methyl-cytidine-3'-phosphate
  modified_base 8: mod_base = OTHER; note = 2'-deoxy-2'-fluoro-adenosine-3'-phosphate
  modified_base 9: mod_base = OTHER; note = 2'-deoxy-2'-fluoro-uridine-3'-phosphate
  modified_base 10: mod_base = OTHER; note = 2'-O-methyl-adenosine-3'-phosphate
  modified_base 11: mod_base = OTHER; note = 2'-O-methyl-uridine-3'-phosphate
  modified_base 12: mod_base = OTHER; note = 2'-O-methyl-uridine-3'-phosphate
  modified_base 13: mod_base = OTHER; note = 2'-O-methyl-adenosine-3'-phosphate
  modified_base 14: mod_base = OTHER; note = 2'-deoxy-2'-fluoro-adenosine-3'-phosphate
  modified_base 15: mod_base = OTHER; note = 2'-O-methyl-guanosine-3'-phosphate
  modified_base 16: mod_base = OTHER; note = 2'-deoxy-2'-fluoro-adenosine-3'-phosphate
  modified_base 17: mod_base = OTHER; note = 2'-O-methyl-uridine-3'-phosphate
  modified_base 18: mod_base = OTHER; note = 2'-O-methyl-guanosine-3'-phosphate
  modified_base 19: mod_base = OTHER; note = 2'-O-methyl-adenosine-3'-phosphorothioate
  modified_base 20: mod_base = OTHER; note = 2'-O-methyl-uridine-3'-phosphorothioate
  modified_base 21: mod_base = OTHER; note = 2'-O-methyl-uridine-3'-phosphate
tagagacatattaagatgatt

SEQ ID NO: 2086 - RNA, 21 nt, synthetic construct
  source 1..21: mol_type = other RNA
  modified_base 1: mod_base = OTHER; note = 2'-O-methyl-uridine-3'-phosphorothioate
  modified_base 2: mod_base = OTHER; note = 2'-deoxy-2'-fluoro-adenosine-3'-phosphorothioate
  modified_base 3: mod_base = OTHER; note = 2'-O-methyl-adenosine-3'-phosphate
  modified_base 4: mod_base = OTHER; note = 2'-O-methyl-guanosine-3'-phosphate
  modified_base 5: mod_base = OTHER; note = 2'-O-methyl-adenosine-3'-phosphate
  modified_base 6: mod_base = OTHER; note = 2'-deoxy-2'-fluoro-guanosine-3'-phosphate
  modified_base 7: mod_base = OTHER; note = 2'-O-methyl-adenosine-3'-phosphate
  modified_base 8: mod_base = OTHER; note = 2'-deoxy-2'-fluoro-cytidine-3'-phosphate
  modified_base 9: mod_base = OTHER; note = 2'-deoxy-2'-fluoro-adenosine-3'-phosphate
  modified_base 10: mod_base = OTHER; note = 2'-O-methyl-uridine-3'-phosphate
  modified_base 11: mod_base = OTHER; note = 2'-O-methyl-adenosine-3'-phosphate
  modified_base 12: mod_base = OTHER; note = 2'-O-methyl-uridine-3'-phosphate
  modified_base 13: mod_base = OTHER; note = 2'-O-methyl-uridine-3'-phosphate
  modified_base 14: mod_base = OTHER; note = 2'-deoxy-2'-fluoro-adenosine-3'-phosphate
  modified_base 15: mod_base = OTHER; note = 2'-O-methyl-adenosine-3'-phosphate
  modified_base 16: mod_base = OTHER; note = 2'-deoxy-2'-fluoro-guanosine-3'-phosphate
  modified_base 17: mod_base = OTHER; note = 2'-O-methyl-adenosine-3'-phosphate
  modified_base 18: mod_base = OTHER; note = 2'-O-methyl-uridine-3'-phosphate
  modified_base 19: mod_base = OTHER; note = 2'-O-methyl-guanosine-3'-phosphorothioate
  modified_base 20: mod_base = OTHER; note = 2'-O-methyl-uridine-3'-phosphorothioate
  modified_base 21: mod_base = OTHER; note = 2'-O-methyl-uridine-3'-phosphate
taagagacatattaagatgtt

SEQ ID NO: 2087 - RNA, 21 nt, synthetic construct
  source 1..21: mol_type = other RNA
  modified_base 1: mod_base = OTHER; note = 2'-O-methyl-uridine-3'-phosphorothioate
  modified_base 2: mod_base = OTHER; note = 2'-deoxy-2'-fluoro-uridine-3'-phosphorothioate
  modified_base 3: mod_base = OTHER; note = 2'-O-methyl-adenosine-3'-phosphate
  modified_base 4: mod_base = OTHER; note = 2'-O-methyl-cytidine-3'-phosphate
  modified_base 5: mod_base = OTHER; note = 2'-O-methyl-adenosine-3'-phosphate
  modified_base 6: mod_base = OTHER; note = 2'-deoxy-2'-fluoro-guanosine-3'-phosphate
  modified_base 7: mod_base = OTHER; note = 2'-O-methyl-adenosine-3'-phosphate
  modified_base 8: mod_base = OTHER; note = 2'-deoxy-2'-fluoro-uridine-3'-phosphate
  modified_base 9: mod_base = OTHER; note = 2'-deoxy-2'-fluoro-cytidine-3'-phosphate
  modified_base 10: mod_base = OTHER; note = 2'-O-methyl-adenosine-3'-phosphate
  modified_base 11: mod_base = OTHER; note = 2'-O-methyl-guanosine-3'-phosphate
  modified_base 12: mod_base = OTHER; note = 2'-O-methyl-cytidine-3'-phosphate
  modified_base 13: mod_base = OTHER; note = 2'-O-methyl-adenosine-3'-phosphate
  modified_base 14: mod_base = OTHER; note = 2'-deoxy-2'-fluoro-adenosine-3'-phosphate
  modified_base 15: mod_base = OTHER; note = 2'-O-methyl-guanosine-3'-phosphate
  modified_base 16: mod_base = OTHER; note = 2'-deoxy-2'-fluoro-adenosine-3'-phosphate
  modified_base 17: mod_base = OTHER; note = 2'-O-methyl-guanosine-3'-phosphate
  modified_base 18: mod_base = OTHER; note = 2'-O-methyl-adenosine-3'-phosphate
  modified_base 19: mod_base = OTHER; note = 2'-O-methyl-cytidine-3'-phosphorothioate
  modified_base 20: mod_base = OTHER; note = 2'-O-methyl-uridine-3'-phosphorothioate
  modified_base 21: mod_base = OTHER; note = 2'-O-methyl-uridine-3'-phosphate
ttacagatcagcaagagactt

SEQ ID NO: 2088 - RNA, 21 nt, synthetic construct
  source 1..21: mol_type = other RNA
  modified_base 1: mod_base = OTHER; note = 2'-O-methyl-uridine-3'-phosphorothioate
  modified_base 2: mod_base = OTHER; note = 2'-deoxy-2'-fluoro-adenosine-3'-phosphorothioate
  modified_base 3: mod_base = OTHER; note = 2'-O-methyl-uridine-3'-phosphate
  modified_base 4: mod_base = OTHER; note = 2'-O-methyl-adenosine-3'-phosphate
  modified_base 5: mod_base = OTHER; note = 2'-O-methyl-cytidine-3'-phosphate
  modified_base 6: mod_base = OTHER; note = 2'-deoxy-2'-fluoro-adenosine-3'-phosphate
  modified_base 7: mod_base = OTHER; note = 2'-O-methyl-guanosine-3'-phosphate
  modified_base 8: mod_base = OTHER; note = 2'-deoxy-2'-fluoro-adenosine-3'-phosphate
  modified_base 9: mod_base = OTHER; note = 2'-deoxy-2'-fluoro-uridine-3'-phosphate
  modified_base 10: mod_base = OTHER; note = 2'-O-methyl-cytidine-3'-phosphate
  modified_base 11: mod_base = OTHER; note = 2'-O-methyl-adenosine-3'-phosphate
  modified_base 12: mod_base = OTHER; note = 2'-O-methyl-guanosine-3'-phosphate
  modified_base 13: mod_base = OTHER; note = 2'-O-methyl-cytidine-3'-phosphate
  modified_base 14: mod_base = OTHER; note = 2'-deoxy-2'-fluoro-adenosine-3'-phosphate
  modified_base 15: mod_base = OTHER; note = 2'-O-methyl-adenosine-3'-phosphate
  modified_base 16: mod_base = OTHER; note = 2'-deoxy-2'-fluoro-guanosine-3'-phosphate
  modified_base 17: mod_base = OTHER; note = 2'-O-methyl-adenosine-3'-phosphate
  modified_base 18: mod_base = OTHER; note = 2'-O-methyl-guanosine-3'-phosphate
  modified_base 19: mod_base = OTHER; note = 2'-O-methyl-adenosine-3'-phosphorothioate
  modified_base 20: mod_base = OTHER; note = 2'-O-methyl-uridine-3'-phosphorothioate
  modified_base 21: mod_base = OTHER; note = 2'-O-methyl-uridine-3'-phosphate
tatacagatcagcaagagatt

SEQ ID NO: 2089 - RNA, 21 nt, synthetic construct
  source 1..21: mol_type = other RNA
  modified_base 1: mod_base = OTHER; note = 2'-O-methyl-uridine-3'-phosphorothioate
  modified_base 2: mod_base = OTHER; note = 2'-deoxy-2'-fluoro-guanosine-3'-phosphorothioate
  modified_base 3: mod_base = OTHER; note = 2'-O-methyl-adenosine-3'-phosphate
  modified_base 4: mod_base = OTHER; note = 2'-O-methyl-uridine-3'-phosphate
  modified_base 5: mod_base = OTHER; note = 2'-O-methyl-adenosine-3'-phosphate
  modified_base 6: mod_base = OTHER; note = 2'-deoxy-2'-fluoro-cytidine-3'-phosphate
  modified_base 7: mod_base = OTHER; note = 2'-O-methyl-adenosine-3'-phosphate
  modified_base 8: mod_base = OTHER; note = 2'-deoxy-2'-fluoro-guanosine-3'-phosphate
  modified_base 9: mod_base = OTHER; note = 2'-deoxy-2'-fluoro-adenosine-3'-phosphate
  modified_base 10: mod_base = OTHER; note = 2'-O-methyl-uridine-3'-phosphate
  modified_base 11: mod_base = OTHER; note = 2'-O-methyl-cytidine-3'-phosphate
  modified_base 12: mod_base = OTHER; note = 2'-O-methyl-adenosine-3'-phosphate
  modified_base 13: mod_base = OTHER; note = 2'-O-methyl-guanosine-3'-phosphate
  modified_base 14: mod_base = OTHER; note = 2'-deoxy-2'-fluoro-cytidine-3'-phosphate
  modified_base 15: mod_base = OTHER; note = 2'-O-methyl-adenosine-3'-phosphate
  modified_base 16: mod_base = OTHER; note = 2'-deoxy-2'-fluoro-adenosine-3'-phosphate
  modified_base 17: mod_base = OTHER; note = 2'-O-methyl-guanosine-3'-phosphate
  modified_base 18: mod_base = OTHER; note = 2'-O-methyl-adenosine-3'-phosphate
  modified_base 19: mod_base = OTHER; note = 2'-O-methyl-guanosine-3'-phosphorothioate
  modified_base 20: mod_base = OTHER; note = 2'-O-methyl-uridine-3'-phosphorothioate
  modified_base 21: mod_base = OTHER; note = 2'-O-methyl-uridine-3'-phosphate
tgatacagatcagcaagagtt

SEQ ID NO: 2090 - RNA, 21 nt, synthetic construct
  source 1..21: mol_type = other RNA
  modified_base 1: mod_base = OTHER; note = 2'-O-methyl-uridine-3'-phosphorothioate
  modified_base 2: mod_base = OTHER; note = 2'-deoxy-2'-fluoro-uridine-3'-phosphorothioate
  modified_base 3: mod_base = OTHER; note = 2'-O-methyl-guanosine-3'-phosphate
  modified_base 4: mod_base = OTHER; note = 2'-O-methyl-adenosine-3'-phosphate
  modified_base 5: mod_base = OTHER; note = 2'-O-methyl-uridine-3'-phosphate
  modified_base 6: mod_base = OTHER; note = 2'-deoxy-2'-fluoro-adenosine-3'-phosphate
  modified_base 7: mod_base = OTHER; note = 2'-O-methyl-cytidine-3'-phosphate
  modified_base 8: mod_base = OTHER; note = 2'-deoxy-2'-fluoro-adenosine-3'-phosphate
  modified_base 9: mod_base = OTHER; note = 2'-deoxy-2'-fluoro-guanosine-3'-phosphate
  modified_base 10: mod_base = OTHER; note = 2'-O-methyl-adenosine-3'-phosphate
  modified_base 11: mod_base = OTHER; note = 2'-O-methyl-uridine-3'-phosphate
  modified_base 12: mod_base = OTHER; note = 2'-O-methyl-cytidine-3'-phosphate
  modified_base 13: mod_base = OTHER; note = 2'-O-methyl-adenosine-3'-phosphate
  modified_base 14: mod_base = OTHER; note = 2'-deoxy-2'-fluoro-guanosine-3'-phosphate
  modified_base 15: mod_base = OTHER; note = 2'-O-methyl-cytidine-3'-phosphate
  modified_base 16: mod_base = OTHER; note = 2'-deoxy-2'-fluoro-adenosine-3'-phosphate
  modified_base 17: mod_base = OTHER; note = 2'-O-methyl-adenosine-3'-phosphate
  modified_base 18: mod_base = OTHER; note = 2'-O-methyl-guanosine-3'-phosphate
  modified_base 19: mod_base = OTHER; note = 2'-O-methyl-adenosine-3'-phosphorothioate
  modified_base 20: mod_base = OTHER; note = 2'-O-methyl-uridine-3'-phosphorothioate
  modified_base 21: mod_base = OTHER; note = 2'-O-methyl-uridine-3'-phosphate
ttgatacagatcagcaagatt

SEQ ID NO: 2091 - RNA, 21 nt, synthetic construct
  source 1..21: mol_type = other RNA
  modified_base 1: mod_base = OTHER; note = 2'-O-methyl-uridine-3'-phosphorothioate
  modified_base 2: mod_base = OTHER; note = 2'-deoxy-2'-fluoro-adenosine-3'-phosphorothioate
  modified_base 3: mod_base = OTHER; note = 2'-O-methyl-uridine-3'-phosphate
  modified_base 4: mod_base = OTHER; note = 2'-O-methyl-guanosine-3'-phosphate
  modified_base 5: mod_base = OTHER; note = 2'-O-methyl-adenosine-3'-phosphate
  modified_base 6: mod_base = OTHER; note = 2'-deoxy-2'-fluoro-uridine-3'-phosphate
  modified_base 7: mod_base = OTHER; note = 2'-O-methyl-adenosine-3'-phosphate
  modified_base 8: mod_base = OTHER; note = 2'-deoxy-2'-fluoro-cytidine-3'-phosphate
  modified_base 9: mod_base = OTHER; note = 2'-deoxy-2'-fluoro-adenosine-3'-phosphate
  modified_base 10: mod_base = OTHER; note = 2'-O-methyl-guanosine-3'-phosphate
  modified_base 11: mod_base = OTHER; note = 2'-O-methyl-adenosine-3'-phosphate
  modified_base 12: mod_base = OTHER; note = 2'-O-methyl-uridine-3'-phosphate
  modified_base 13: mod_base = OTHER; note = 2'-O-methyl-cytidine-3'-phosphate
  modified_base 14: mod_base = OTHER; note = 2'-deoxy-2'-fluoro-adenosine-3'-phosphate
  modified_base 15: mod_base = OTHER; note = 2'-O-methyl-guanosine-3'-phosphate
  modified_base 16: mod_base = OTHER; note = 2'-deoxy-2'-fluoro-cytidine-3'-phosphate
  modified_base 17: mod_base = OTHER; note = 2'-O-methyl-adenosine-3'-phosphate
  modified_base 18: mod_base = OTHER; note = 2'-O-methyl-adenosine-3'-phosphate
  modified_base 19: mod_base = OTHER; note = 2'-O-methyl-guanosine-3'-phosphorothioate
  modified_base 20: mod_base = OTHER; note = 2'-O-methyl-uridine-3'-phosphorothioate
  modified_base 21: mod_base = OTHER; note = 2'-O-methyl-uridine-3'-phosphate
tatgatacagatcagcaagtt

SEQ ID NO: 2092 - RNA, 21 nt, synthetic construct
  source 1..21: mol_type = other RNA
  modified_base 1: mod_base = OTHER; note = 2'-O-methyl-uridine-3'-phosphorothioate
  modified_base 2: mod_base = OTHER; note = 2'-deoxy-2'-fluoro-guanosine-3'-phosphorothioate
  modified_base 3: mod_base = OTHER; note = 2'-O-methyl-adenosine-3'-phosphate
  modified_base 4: mod_base = OTHER; note = 2'-O-methyl-adenosine-3'-phosphate
  modified_base 5: mod_base = OTHER; note = 2'-O-methyl-cytidine-3'-phosphate
  modified_base 6: mod_base = OTHER; note = 2'-deoxy-2'-fluoro-uridine-3'-phosphate
  modified_base 7: mod_base = OTHER; note = 2'-O-methyl-uridine-3'-phosphate
  modified_base 8: mod_base = OTHER; note = 2'-deoxy-2'-fluoro-cytidine-3'-phosphate
  modified_base 9: mod_base = OTHER; note = 2'-deoxy-2'-fluoro-adenosine-3'-phosphate
  modified_base 10: mod_base = OTHER; note = 2'-O-methyl-guanosine-3'-phosphate
  modified_base 11: mod_base = OTHER; note = 2'-O-methyl-adenosine-3'-phosphate
  modified_base 12: mod_base = OTHER; note = 2'-O-methyl-guanosine-3'-phosphate
  modified_base 13: mod_base = OTHER; note = 2'-O-methyl-adenosine-3'-phosphate
  modified_base 14: mod_base = OTHER; note = 2'-deoxy-2'-fluoro-adenosine-3'-phosphate
  modified_base 15: mod_base = OTHER; note = 2'-O-methyl-guanosine-3'-phosphate
  modified_base 16: mod_base = OTHER; note = 2'-deoxy-2'-fluoro-cytidine-3'-phosphate
  modified_base 17: mod_base = OTHER; note = 2'-O-methyl-adenosine-3'-phosphate
  modified_base 18: mod_base = OTHER; note = 2'-O-methyl-uridine-3'-phosphate
  modified_base 19: mod_base = OTHER; note = 2'-O-methyl-cytidine-3'-phosphorothioate
  modified_base 20: mod_base = OTHER; note = 2'-O-methyl-uridine-3'-phosphorothioate
  modified_base 21: mod_base = OTHER; note = 2'-O-methyl-uridine-3'-phosphate
tgaacttcagagaagcatctt

SEQ ID NO: 2093 - RNA, 21 nt, synthetic construct
  source 1..21: mol_type = other RNA
  modified_base 1: mod_base = OTHER; note = 2'-O-methyl-uridine-3'-phosphorothioate
  modified_base 2: mod_base = OTHER; note = 2'-deoxy-2'-fluoro-adenosine-3'-phosphorothioate
  modified_base 3: mod_base = OTHER; note = 2'-O-methyl-guanosine-3'-phosphate
  modified_base 4: mod_base = OTHER; note = 2'-O-methyl-adenosine-3'-phosphate
  modified_base 5: mod_base = OTHER; note = 2'-O-methyl-adenosine-3'-phosphate
  modified_base 6: mod_base = OTHER; note = 2'-deoxy-2'-fluoro-cytidine-3'-phosphate
  modified_base 7: mod_base = OTHER; note = 2'-O-methyl-uridine-3'-phosphate
  modified_base 8: mod_base = OTHER; note = 2'-deoxy-2'-fluoro-uridine-3'-phosphate
  modified_base 9: mod_base = OTHER; note = 2'-deoxy-2'-fluoro-cytidine-3'-phosphate
  modified_base 10: mod_base = OTHER; note = 2'-O-methyl-adenosine-3'-phosphate
  modified_base 11: mod_base = OTHER; note = 2'-O-methyl-guanosine-3'-phosphate
  modified_base 12: mod_base = OTHER; note = 2'-O-methyl-adenosine-3'-phosphate
  modified_base 13: mod_base = OTHER; note = 2'-O-methyl-guanosine-3'-phosphate
  modified_base 14: mod_base = OTHER; note = 2'-deoxy-2'-fluoro-adenosine-3'-phosphate
  modified_base 15: mod_base = OTHER; note = 2'-O-methyl-adenosine-3'-phosphate
  modified_base 16: mod_base = OTHER; note = 2'-deoxy-2'-fluoro-guanosine-3'-phosphate
  modified_base 17: mod_base = OTHER; note = 2'-O-methyl-cytidine-3'-phosphate
  modified_base 18: mod_base = OTHER; note = 2'-O-methyl-adenosine-3'-phosphate
  modified_base 19: mod_base = OTHER; note = 2'-O-methyl-uridine-3'-phosphorothioate
  modified_base 20: mod_base = OTHER; note = 2'-O-methyl-uridine-3'-phosphorothioate
  modified_base 21: mod_base = OTHER; note = 2'-O-methyl-uridine-3'-phosphate
tagaacttcagagaagcattt

SEQ ID NO: 2094 - RNA, 21 nt, synthetic construct
  source 1..21: mol_type = other RNA
  modified_base 1: mod_base = OTHER; note = 2'-O-methyl-uridine-3'-phosphorothioate
  modified_base 2: mod_base = OTHER; note = 2'-deoxy-2'-fluoro-guanosine-3'-phosphorothioate
  modified_base 3: mod_base = OTHER; note = 2'-O-methyl-uridine-3'-phosphate
  modified_base 4: mod_base = OTHER; note = 2'-O-methyl-adenosine-3'-phosphate
  modified_base 5: mod_base = OTHER; note = 2'-O-methyl-guanosine-3'-phosphate
  modified_base 6: mod_base = OTHER; note = 2'-deoxy-2'-fluoro-cytidine-3'-phosphate
  modified_base 7: mod_base = OTHER; note = 2'-O-methyl-adenosine-3'-phosphate
  modified_base 8: mod_base = OTHER; note = 2'-deoxy-2'-fluoro-guanosine-3'-phosphate
  modified_base 9: mod_base = OTHER; note = 2'-deoxy-2'-fluoro-adenosine-3'-phosphate
  modified_base 10: mod_base = OTHER; note = 2'-O-methyl-adenosine-3'-phosphate
  modified_base 11: mod_base = OTHER; note = 2'-O-methyl-cytidine-3'-phosphate
  modified_base 12: mod_base = OTHER; note = 2'-O-methyl-uridine-3'-phosphate
  modified_base 13: mod_base = OTHER; note = 2'-O-methyl-uridine-3'-phosphate
  modified_base 14: mod_base = OTHER; note = 2'-deoxy-2'-fluoro-cytidine-3'-phosphate
  modified_base 15: mod_base = OTHER; note = 2'-O-methyl-adenosine-3'-phosphate
  modified_base 16: mod_base = OTHER; note = 2'-deoxy-2'-fluoro-guanosine-3'-phosphate
  modified_base 17: mod_base = OTHER; note = 2'-O-methyl-adenosine-3'-phosphate
  modified_base 18: mod_base = OTHER; note = 2'-O-methyl-guanosine-3'-phosphate
  modified_base 19: mod_base = OTHER; note = 2'-O-methyl-adenosine-3'-phosphorothioate
  modified_base 20: mod_base = OTHER; note = 2'-O-methyl-uridine-3'-phosphorothioate
  modified_base 21: mod_base = OTHER; note = 2'-O-methyl-uridine-3'-phosphate
tgtagcagaacttcagagatt

SEQ ID NO: 2095 - RNA, 21 nt, synthetic construct
  source 1..21: mol_type = other RNA
  modified_base 1: mod_base = OTHER; note = 2'-O-methyl-uridine-3'-phosphorothioate
  modified_base 2: mod_base = OTHER; note = 2'-deoxy-2'-fluoro-adenosine-3'-phosphorothioate
  modified_base 3: mod_base = OTHER; note = 2'-O-methyl-guanosine-3'-phosphate
  modified_base 4: mod_base = OTHER; note = 2'-O-methyl-guanosine-3'-phosphate
  modified_base 5: mod_base = OTHER; note = 2'-O-methyl-uridine-3'-phosphate
  modified_base 6: mod_base = OTHER; note = 2'-deoxy-2'-fluoro-uridine-3'-phosphate
  modified_base 7: mod_base = OTHER; note = 2'-O-methyl-guanosine-3'-phosphate
  modified_base 8: mod_base = OTHER; note = 2'-deoxy-2'-fluoro-uridine-3'-phosphate
  modified_base 9: mod_base = OTHER; note = 2'-deoxy-2'-fluoro-adenosine-3'-phosphate
  modified_base 10: mod_base = OTHER; note = 2'-O-methyl-guanosine-3'-phosphate
  modified_base 11: mod_base = OTHER; note = 2'-O-methyl-cytidine-3'-phosphate
  modified_base 12: mod_base = OTHER; note = 2'-O-methyl-adenosine-3'-phosphate
  modified_base 13: mod_base = OTHER; note = 2'-O-methyl-guanosine-3'-phosphate
  modified_base 14: mod_base = OTHER; note = 2'-deoxy-2'-fluoro-adenosine-3'-phosphate
  modified_base 15: mod_base = OTHER; note = 2'-O-methyl-adenosine-3'-phosphate
  modified_base 16: mod_base = OTHER; note = 2'-deoxy-2'-fluoro-cytidine-3'-phosphate
  modified_base 17: mod_base = OTHER; note = 2'-O-methyl-uridine-3'-phosphate
  modified_base 18: mod_base = OTHER; note = 2'-O-methyl-uridine-3'-phosphate
  modified_base 19: mod_base = OTHER; note = 2'-O-methyl-cytidine-3'-phosphorothioate
  modified_base 20: mod_base = OTHER; note = 2'-O-methyl-uridine-3'-phosphorothioate
  modified_base 21: mod_base = OTHER; note = 2'-O-methyl-uridine-3'-phosphate
taggttgtagcagaacttctt

SEQ ID NO: 2096 - RNA, 21 nt, synthetic construct
  source 1..21: mol_type = other RNA
  modified_base 1: mod_base = OTHER; note = 2'-O-methyl-uridine-3'-phosphorothioate
  modified_base 2: mod_base = OTHER; note = 2'-deoxy-2'-fluoro-guanosine-3'-phosphorothioate
  modified_base 3: mod_base = OTHER; note = 2'-O-methyl-cytidine-3'-phosphate
  modified_base 4: mod_base = OTHER; note = 2'-O-methyl-adenosine-3'-phosphate
  modified_base 5: mod_base = OTHER; note = 2'-O-methyl-guanosine-3'-phosphate
  modified_base 6: mod_base = OTHER; note = 2'-deoxy-2'-fluoro-adenosine-3'-phosphate
  modified_base 7: mod_base = OTHER; note = 2'-O-methyl-uridine-3'-phosphate
  modified_base 8: mod_base = OTHER; note = 2'-deoxy-2'-fluoro-cytidine-3'-phosphate
  modified_base 9: mod_base = OTHER; note = 2'-deoxy-2'-fluoro-uridine-3'-phosphate
  modified_base 10: mod_base = OTHER; note = 2'-O-methyl-adenosine-3'-phosphate
  modified_base 11: mod_base = OTHER; note = 2'-O-methyl-guanosine-3'-phosphate
  modified_base 12: mod_base = OTHER; note = 2'-O-methyl-adenosine-3'-phosphate
  modified_base 13: mod_base = OTHER; note = 2'-O-methyl-guanosine-3'-phosphate
  modified_base 14: mod_base = OTHER; note = 2'-deoxy-2'-fluoro-guanosine-3'-phosphate
  modified_base 15: mod_base = OTHER; note = 2'-O-methyl-uridine-3'-phosphate
  modified_base 16: mod_base = OTHER; note = 2'-deoxy-2'-fluoro-uridine-3'-phosphate
  modified_base 17: mod_base = OTHER; note = 2'-O-methyl-guanosine-3'-phosphate
  modified_base 18: mod_base = OTHER; note = 2'-O-methyl-uridine-3'-phosphate
  modified_base 19: mod_base = OTHER; note = 2'-O-methyl-adenosine-3'-phosphorothioate
  modified_base 20: mod_base = OTHER; note = 2'-O-methyl-uridine-3'-phosphorothioate
  modified_base 21: mod_base = OTHER; note = 2'-O-methyl-uridine-3'-phosphate
tgcagatctagaggttgtatt

SEQ ID NO: 2097 - RNA, 21 nt, synthetic construct
  source 1..21: mol_type = other RNA
  modified_base 1: mod_base = OTHER; note = 2'-O-methyl-uridine-3'-phosphorothioate
  modified_base 2: mod_base = OTHER; note = 2'-deoxy-2'-fluoro-uridine-3'-phosphorothioate
  modified_base 3: mod_base = OTHER; note = 2'-O-methyl-cytidine-3'-phosphate
  modified_base 4: mod_base = OTHER; note = 2'-O-methyl-uridine-3'-phosphate
  modified_base 5: mod_base = OTHER; note = 2'-O-methyl-guanosine-3'-phosphate
  modified_base 6: mod_base = OTHER; note = 2'-deoxy-2'-fluoro-cytidine-3'-phosphate
  modified_base 7: mod_base = OTHER; note = 2'-O-methyl-adenosine-3'-phosphate
  modified_base 8: mod_base = OTHER; note = 2'-deoxy-2'-fluoro-uridine-3'-phosphate
  modified_base 9: mod_base = OTHER; note = 2'-deoxy-2'-fluoro-guanosine-3'-phosphate
  modified_base 10: mod_base = OTHER; note = 2'-O-methyl-guanosine-3'-phosphate
  modified_base 11: mod_base = OTHER; note = 2'-O-methyl-guanosine-3'-phosphate
  modified_base 12: mod_base = OTHER; note = 2'-O-methyl-adenosine-3'-phosphate
  modified_base 13: mod_base = OTHER; note = 2'-O-methyl-uridine-3'-phosphate
  modified_base 14: mod_base = OTHER; note = 2'-deoxy-2'-fluoro-guanosine-3'-phosphate
  modified_base 15: mod_base = OTHER; note = 2'-O-methyl-adenosine-3'-phosphate
  modified_base 16: mod_base = OTHER; note = 2'-deoxy-2'-fluoro-cytidine-3'-phosphate
  modified_base 17: mod_base = OTHER; note = 2'-O-methyl-adenosine-3'-phosphate
  modified_base 18: mod_base = OTHER; note = 2'-O-methyl-guanosine-3'-phosphate
  modified_base 19: mod_base = OTHER; note = 2'-O-methyl-adenosine-3'-phosphorothioate
  modified_base 20: mod_base = OTHER; note = 2'-O-methyl-uridine-3'-phosphorothioate
  modified_base 21: mod_base = OTHER; note = 2'-O-methyl-uridine-3'-phosphate
ttctgcatgggatgacagatt

SEQ ID NO: 2098 - RNA, 21 nt, synthetic construct
  source 1..21: mol_type = other RNA
  modified_base 1: mod_base = OTHER; note = 2'-O-methyl-uridine-3'-phosphorothioate
  modified_base 2: mod_base = OTHER; note = 2'-deoxy-2'-fluoro-uridine-3'-phosphorothioate
  modified_base 3: mod_base = OTHER; note = 2'-O-methyl-cytidine-3'-phosphate
  modified_base 4: mod_base = OTHER; note = 2'-O-methyl-uridine-3'-phosphate
  modified_base 5: mod_base = OTHER; note = 2'-O-methyl-uridine-3'-phosphate
  modified_base 6: mod_base = OTHER; note = 2'-deoxy-2'-fluoro-cytidine-3'-phosphate
  modified_base 7: mod_base = OTHER; note = 2'-O-methyl-uridine-3'-phosphate
  modified_base 8: mod_base = OTHER; note = 2'-deoxy-2'-fluoro-adenosine-3'-phosphate
  modified_base 9: mod_base = OTHER; note = 2'-deoxy-2'-fluoro-cytidine-3'-phosphate
  modified_base 10: mod_base = OTHER; note = 2'-O-methyl-uridine-3'-phosphate
  modified_base 11: mod_base = OTHER; note = 2'-O-methyl-cytidine-3'-phosphate
  modified_base 12: mod_base = OTHER; note = 2'-O-methyl-adenosine-3'-phosphate
  modified_base 13: mod_base = OTHER; note = 2'-O-methyl-guanosine-3'-phosphate
  modified_base 14: mod_base = OTHER; note = 2'-deoxy-2'-fluoro-guanosine-3'-phosphate
  modified_base 15: mod_base = OTHER; note = 2'-O-methyl-adenosine-3'-phosphate
  modified_base 16: mod_base = OTHER; note = 2'-deoxy-2'-fluoro-adenosine-3'-phosphate
  modified_base 17: mod_base = OTHER; note = 2'-O-methyl-guanosine-3'-phosphate
  modified_base 18: mod_base = OTHER; note = 2'-O-methyl-uridine-3'-phosphate
  modified_base 19: mod_base = OTHER; note = 2'-O-methyl-guanosine-3'-phosphorothioate
  modified_base 20: mod_base = OTHER; note = 2'-O-methyl-uridine-3'-phosphorothioate
  modified_base 21: mod_base = OTHER; note = 2'-O-methyl-uridine-3'-phosphate
ttcttctactcaggaagtgtt

SEQ ID NO: 2099 - RNA, 21 nt, synthetic construct
  source 1..21: mol_type = other RNA
  modified_base 1: mod_base = OTHER; note = 2'-O-methyl-uridine-3'-phosphorothioate
  modified_base 2: mod_base = OTHER; note = 2'-deoxy-2'-fluoro-adenosine-3'-phosphorothioate
  modified_base 3: mod_base = OTHER; note = 2'-O-methyl-adenosine-3'-phosphate
  modified_base 4: mod_base = OTHER; note = 2'-O-methyl-adenosine-3'-phosphate
  modified_base 5: mod_base = OTHER; note = 2'-O-methyl-cytidine-3'-phosphate
  modified_base 6: mod_base = OTHER; note = 2'-deoxy-2'-fluoro-uridine-3'-phosphate
  modified_base 7: mod_base = OTHER; note = 2'-O-methyl-cytidine-3'-phosphate
  modified_base 8: mod_base = OTHER; note = 2'-deoxy-2'-fluoro-uridine-3'-phosphate
  modified_base 9: mod_base = OTHER; note = 2'-deoxy-2'-fluoro-uridine-3'-phosphate
  modified_base 10: mod_base = OTHER; note = 2'-O-methyl-cytidine-3'-phosphate
  modified_base 11: mod_base = OTHER; note = 2'-O-methyl-uridine-3'-phosphate
  modified_base 12: mod_base = OTHER; note = 2'-O-methyl-adenosine-3'-phosphate
  modified_base 13: mod_base = OTHER; note = 2'-O-methyl-cytidine-3'-phosphate
  modified_base 14: mod_base = OTHER; note = 2'-deoxy-2'-fluoro-uridine-3'-phosphate
  modified_base 15: mod_base = OTHER; note = 2'-O-methyl-cytidine-3'-phosphate
  modified_base 16: mod_base = OTHER; note = 2'-deoxy-2'-fluoro-adenosine-3'-phosphate
  modified_base 17: mod_base = OTHER; note = 2'-O-methyl-guanosine-3'-phosphate
  modified_base 18: mod_base = OTHER; note = 2'-O-methyl-guanosine-3'-phosphate
  modified_base 19: mod_base = OTHER; note = 2'-O-methyl-adenosine-3'-phosphorothioate
  modified_base 20: mod_base = OTHER; note = 2'-O-methyl-uridine-3'-phosphorothioate
  modified_base 21: mod_base = OTHER; note = 2'-O-methyl-uridine-3'-phosphate
taaactcttctactcaggatt

SEQ ID NO: 2100 - RNA, 21 nt, synthetic construct
  source 1..21: mol_type = other RNA
  modified_base 1: mod_base = OTHER; note = 2'-O-methyl-uridine-3'-phosphorothioate
  modified_base 2: mod_base = OTHER; note = 2'-deoxy-2'-fluoro-adenosine-3'-phosphorothioate
  modified_base 3: mod_base = OTHER; note = 2'-O-methyl-guanosine-3'-phosphate
  modified_base 4: mod_base = OTHER; note = 2'-O-methyl-adenosine-3'-phosphate
  modified_base 5: mod_base = OTHER; note = 2'-O-methyl-adenosine-3'-phosphate
  modified_base 6: mod_base = OTHER; note = 2'-deoxy-2'-fluoro-adenosine-3'-phosphate
  modified_base 7: mod_base = OTHER; note = 2'-O-methyl-cytidine-3'-phosphate
  modified_base 8: mod_base = OTHER; note = 2'-deoxy-2'-fluoro-uridine-3'-phosphate
  modified_base 9: mod_base = OTHER; note = 2'-deoxy-2'-fluoro-cytidine-3'-phosphate
  modified_base 10: mod_base = OTHER; note = 2'-O-methyl-uridine-3'-phosphate
  modified_base 11: mod_base = OTHER; note = 2'-O-methyl-uridine-3'-phosphate
  modified_base 12: mod_base = OTHER; note = 2'-O-methyl-cytidine-3'-phosphate
  modified_base 13: mod_base = OTHER; note = 2'-O-methyl-uridine-3'-phosphate
  modified_base 14: mod_base = OTHER; note = 2'-deoxy-2'-fluoro-adenosine-3'-phosphate
  modified_base 15: mod_base = OTHER; note = 2'-O-methyl-cytidine-3'-phosphate
  modified_base 16: mod_base = OTHER; note = 2'-deoxy-2'-fluoro-uridine-3'-phosphate
  modified_base 17: mod_base = OTHER; note = 2'-O-methyl-cytidine-3'-phosphate
  modified_base 18: mod_base = OTHER; note = 2'-O-methyl-adenosine-3'-phosphate
  modified_base 19: mod_base = OTHER; note = 2'-O-methyl-guanosine-3'-phosphorothioate
  modified_base 20: mod_base = OTHER; note = 2'-O-methyl-uridine-3'-phosphorothioate
  modified_base 21: mod_base = OTHER; note = 2'-O-methyl-uridine-3'-phosphate
tagaaactcttctactcagtt

SEQ ID NO: 2101 - RNA, 21 nt, synthetic construct
  source 1..21: mol_type = other RNA
  modified_base 1: mod_base = OTHER; note = 2'-O-methyl-uridine-3'-phosphorothioate
  modified_base 2: mod_base = OTHER; note = 2'-deoxy-2'-fluoro-uridine-3'-phosphorothioate
  modified_base 3: mod_base = OTHER; note = 2'-O-methyl-uridine-3'-phosphate
  modified_base 4: mod_base = OTHER; note = 2'-O-methyl-adenosine-3'-phosphate
  modified_base 5: mod_base = OTHER; note = 2'-O-methyl-guanosine-3'-phosphate
  modified_base 6: mod_base = OTHER; note = 2'-deoxy-2'-fluoro-uridine-3'-phosphate
  modified_base 7: mod_base = OTHER; note = 2'-O-methyl-cytidine-3'-phosphate
  modified_base 8: mod_base = OTHER; note = 2'-deoxy-2'-fluoro-uridine-3'-phosphate
  modified_base 9: mod_base = OTHER; note = 2'-deoxy-2'-fluoro-uridine-3'-phosphate
  modified_base 10: mod_base = OTHER; note = 2'-O-methyl-adenosine-3'-phosphate
  modified_base 11: mod_base = OTHER; note = 2'-O-methyl-adenosine-3'-phosphate
  modified_base 12: mod_base = OTHER; note = 2'-O-methyl-uridine-3'-phosphate
  modified_base 13: mod_base = OTHER; note = 2'-O-methyl-cytidine-3'-phosphate
  modified_base 14: mod_base = OTHER; note = 2'-deoxy-2'-fluoro-uridine-3'-phosphate
  modified_base 15: mod_base = OTHER; note = 2'-O-methyl-uridine-3'-phosphate
  modified_base 16: mod_base = OTHER; note = 2'-deoxy-2'-fluoro-guanosine-3'-phosphate
  modified_base 17: mod_base = OTHER; note = 2'-O-methyl-adenosine-3'-phosphate
  modified_base 18: mod_base = OTHER; note = 2'-O-methyl-cytidine-3'-phosphate
  modified_base 19: mod_base = OTHER; note = 2'-O-methyl-cytidine-3'-phosphorothioate
  modified_base 20: mod_base = OTHER; note = 2'-O-methyl-uridine-3'-phosphorothioate
  modified_base 21: mod_base = OTHER; note = 2'-O-methyl-uridine-3'-phosphate
tttagtcttaatcttgacctt

SEQ ID NO: 2102 - RNA, 21 nt, synthetic construct
  source 1..21: mol_type = other RNA
  modified_base 1: mod_base = OTHER; note = 2'-O-methyl-uridine-3'-phosphorothioate
  modified_base 2: mod_base = OTHER; note = 2'-deoxy-2'-fluoro-uridine-3'-phosphorothioate
  modified_base 3: mod_base = OTHER; note = 2'-O-methyl-uridine-3'-phosphate
  modified_base 4: mod_base = OTHER; note = 2'-O-methyl-cytidine-3'-phosphate
  modified_base 5: mod_base = OTHER; note = 2'-O-methyl-adenosine-3'-phosphate
  modified_base 6: mod_base = OTHER; note = 2'-deoxy-2'-fluoro-uridine-3'-phosphate
  modified_base 7: mod_base = OTHER; note = 2'-O-methyl-guanosine-3'-phosphate
  modified_base 8: mod_base = OTHER; note = 2'-deoxy-2'-fluoro-uridine-3'-phosphate
  modified_base 9: mod_base = OTHER; note = 2'-deoxy-2'-fluoro-uridine-3'-phosphate
  modified_base 10: mod_base = OTHER; note = 2'-O-methyl-uridine-3'-phosphate
  modified_base 11: mod_base = OTHER; note = 2'-O-methyl-adenosine-3'-phosphate
  modified_base 12: mod_base = OTHER; note = 2'-O-methyl-cytidine-3'-phosphate
  modified_base 13: mod_base = OTHER; note = 2'-O-methyl-adenosine-3'-phosphate
  modified_base 14: mod_base = OTHER; note = 2'-deoxy-2'-fluoro-adenosine-3'-phosphate
  modified_base 15: mod_base = OTHER; note = 2'-O-methyl-guanosine-3'-phosphate
  modified_base 16: mod_base = OTHER; note = 2'-deoxy-2'-fluoro-adenosine-3'-phosphate
  modified_base 17: mod_base = OTHER; note = 2'-O-methyl-uridine-3'-phosphate
  modified_base 18: mod_base = OTHER; note = 2'-O-methyl-cytidine-3'-phosphate
  modified_base 19: mod_base = OTHER; note = 2'-O-methyl-cytidine-3'-phosphorothioate
  modified_base 20: mod_base = OTHER; note = 2'-O-methyl-uridine-3'-phosphorothioate
  modified_base 21: mod_base = OTHER; note = 2'-O-methyl-uridine-3'-phosphate
tttcatgtttacaagatcctt

SEQ ID NO: 2103 - RNA, 21 nt, synthetic construct
  source 1..21: mol_type = other RNA
  modified_base 1: mod_base = OTHER; note = 2'-O-methyl-uridine-3'-phosphorothioate
  modified_base 2: mod_base = OTHER; note = 2'-deoxy-2'-fluoro-guanosine-3'-phosphorothioate
  modified_base 3: mod_base = OTHER; note = 2'-O-methyl-uridine-3'-phosphate
  modified_base 4: mod_base = OTHER; note = 2'-O-methyl-uridine-3'-phosphate
  modified_base 5: mod_base = OTHER; note = 2'-O-methyl-guanosine-3'-phosphate
  modified_base 6: mod_base = OTHER; note = 2'-deoxy-2'-fluoro-adenosine-3'-phosphate
  modified_base 7: mod_base = OTHER; note = 2'-O-methyl-guanosine-3'-phosphate
  modified_base 8: mod_base = OTHER; note = 2'-deoxy-2'-fluoro-guanosine-3'-phosphate
  modified_base 9: mod_base = OTHER; note = 2'-deoxy-2'-fluoro-adenosine-3'-phosphate
  modified_base 10: mod_base = OTHER; note = 2'-O-methyl-adenosine-3'-phosphate
  modified_base 11: mod_base = OTHER; note = 2'-O-methyl-adenosine-3'-phosphate
  modified_base 12: mod_base = OTHER; note = 2'-O-methyl-uridine-3'-phosphate
  modified_base 13: mod_base = OTHER; note = 2'-O-methyl-cytidine-3'-phosphate
  modified_base 14: mod_base = OTHER; note = 2'-deoxy-2'-fluoro-adenosine-3'-phosphate
  modified_base 15: mod_base = OTHER; note = 2'-O-methyl-adenosine-3'-phosphate
  modified_base 16: mod_base = OTHER; note = 2'-deoxy-2'-fluoro-cytidine-3'-phosphate
  modified_base 17: mod_base = OTHER; note = 2'-O-methyl-adenosine-3'-phosphate
  modified_base 18: mod_base = OTHER; note = 2'-O-methyl-guanosine-3'-phosphate
  modified_base 19: mod_base = OTHER; note = 2'-O-methyl-uridine-3'-phosphorothioate
  modified_base 20: mod_base = OTHER; note = 2'-O-methyl-uridine-3'-phosphorothioate
  modified_base 21: mod_base = OTHER; note = 2'-O-methyl-uridine-3'-phosphate
tgttgaggaaatcaacagttt

SEQ ID NO: 2104 - RNA, 21 nt, synthetic construct
  source 1..21: mol_type = other RNA
  modified_base 1: mod_base = OTHER; note = 2'-O-methyl-uridine-3'-phosphorothioate
  modified_base 2: mod_base = OTHER; note = 2'-deoxy-2'-fluoro-cytidine-3'-phosphorothioate
  modified_base 3: mod_base = OTHER; note = 2'-O-methyl-adenosine-3'-phosphate
  modified_base 4: mod_base = OTHER; note = 2'-O-methyl-uridine-3'-phosphate
  modified_base 5: mod_base = OTHER; note = 2'-O-methyl-guanosine-3'-phosphate
  modified_base 6: mod_base = OTHER; note = 2'-deoxy-2'-fluoro-uridine-3'-phosphate
  modified_base 7: mod_base = OTHER; note = 2'-O-methyl-uridine-3'-phosphate
  modified_base 8: mod_base = OTHER; note = 2'-deoxy-2'-fluoro-guanosine-3'-phosphate
  modified_base 9: mod_base = OTHER; note = 2'-deoxy-2'-fluoro-adenosine-3'-phosphate
  modified_base 10: mod_base = OTHER; note = 2'-O-methyl-guanosine-3'-phosphate
  modified_base 11: mod_base = OTHER; note = 2'-O-methyl-guanosine-3'-phosphate
  modified_base 12: mod_base = OTHER; note = 2'-O-methyl-adenosine-3'-phosphate
  modified_base 13: mod_base = OTHER; note = 2'-O-methyl-adenosine-3'-phosphate
  modified_base 14: mod_base = OTHER; note = 2'-deoxy-2'-fluoro-adenosine-3'-phosphate
  modified_base 15: mod_base = OTHER; note = 2'-O-methyl-uridine-3'-phosphate
  modified_base 16: mod_base = OTHER; note = 2'-deoxy-2'-fluoro-cytidine-3'-phosphate
  modified_base 17: mod_base = OTHER; note = 2'-O-methyl-adenosine-3'-phosphate
  modified_base 18: mod_base = OTHER; note = 2'-O-methyl-adenosine-3'-phosphate
  modified_base 19: mod_base = OTHER; note = 2'-O-methyl-cytidine-3'-phosphorothioate
  modified_base 20: mod_base = OTHER; note = 2'-O-methyl-uridine-3'-phosphorothioate
  modified_base 21: mod_base = OTHER; note = 2'-O-methyl-uridine-3'-phosphate
tcatgttgaggaaatcaactt

SEQ ID NO: 2105 - RNA, 21 nt, synthetic construct
  source 1..21: mol_type = other RNA
  modified_base 1: mod_base = OTHER; note = 2'-O-methyl-uridine-3'-phosphorothioate
  modified_base 2: mod_base = OTHER; note = 2'-deoxy-2'-fluoro-guanosine-3'-phosphorothioate
  modified_base 3: mod_base = OTHER; note = 2'-O-methyl-cytidine-3'-phosphate
  modified_base 4: mod_base = OTHER; note = 2'-O-methyl-cytidine-3'-phosphate
  modified_base 5: mod_base = OTHER; note = 2'-O-methyl-adenosine-3'-phosphate
  modified_base 6: mod_base = OTHER; note = 2'-deoxy-2'-fluoro-uridine-3'-phosphate
  modified_base 7: mod_base = OTHER; note = 2'-O-methyl-guanosine-3'-phosphate
  modified_base 8: mod_base = OTHER; note = 2'-deoxy-2'-fluoro-uridine-3'-phosphate
  modified_base 9: mod_base = OTHER; note = 2'-deoxy-2'-fluoro-uridine-3'-phosphate
  modified_base 10: mod_base = OTHER; note = 2'-O-methyl-guanosine-3'-phosphate
  modified_base 11: mod_base = OTHER; note = 2'-O-methyl-adenosine-3'-phosphate
  modified_base 12: mod_base = OTHER; note = 2'-O-methyl-guanosine-3'-phosphate
  modified_base 13: mod_base = OTHER; note = 2'-O-methyl-guanosine-3'-phosphate
  modified_base 14: mod_base = OTHER; note = 2'-deoxy-2'-fluoro-adenosine-3'-phosphate
  modified_base 15: mod_base = OTHER; note = 2'-O-methyl-adenosine-3'-phosphate
  modified_base 16: mod_base = OTHER; note = 2'-deoxy-2'-fluoro-adenosine-3'-phosphate
  modified_base 17: mod_base = OTHER; note = 2'-O-methyl-uridine-3'-phosphate
  modified_base 18: mod_base = OTHER; note = 2'-O-methyl-cytidine-3'-phosphate
  modified_base 19: mod_base = OTHER; note = 2'-O-methyl-adenosine-3'-phosphorothioate
  modified_base 20: mod_base = OTHER; note = 2'-O-methyl-uridine-3'-phosphorothioate
  modified_base 21: mod_base = OTHER; note = 2'-O-methyl-uridine-3'-phosphate
tgccatgttgaggaaatcatt

SEQ ID NO: 2106 - RNA, 21 nt, synthetic construct
  source 1..21: mol_type = other RNA
  modified_base 1: mod_base = OTHER; note = 2'-O-methyl-uridine-3'-phosphorothioate
  modified_base 2: mod_base = OTHER; note = 2'-deoxy-2'-fluoro-adenosine-3'-phosphorothioate
  modified_base 3: mod_base = OTHER; note = 2'-O-methyl-guanosine-3'-phosphate
  modified_base 4: mod_base = OTHER; note = 2'-O-methyl-cytidine-3'-phosphate
  modified_base 5: mod_base = OTHER; note = 2'-O-methyl-cytidine-3'-phosphate
  modified_base 6: mod_base = OTHER; note = 2'-deoxy-2'-fluoro-adenosine-3'-phosphate
  modified_base 7: mod_base = OTHER; note = 2'-O-methyl-uridine-3'-phosphate
  modified_base 8: mod_base = OTHER; note = 2'-deoxy-2'-fluoro-guanosine-3'-phosphate
  modified_base 9: mod_base = OTHER; note = 2'-deoxy-2'-fluoro-uridine-3'-phosphate
  modified_base 10: mod_base = OTHER; note = 2'-O-methyl-uridine-3'-phosphate
  modified_base 11: mod_base = OTHER; note = 2'-O-methyl-guanosine-3'-phosphate
  modified_base 12: mod_base = OTHER; note = 2'-O-methyl-adenosine-3'-phosphate
  modified_base 13: mod_base = OTHER; note = 2'-O-methyl-guanosine-3'-phosphate
  modified_base 14: mod_base = OTHER; note = 2'-deoxy-2'-fluoro-guanosine-3'-phosphate
  modified_base 15: mod_base = OTHER; note = 2'-O-methyl-adenosine-3'-phosphate
  modified_base 16: mod_base = OTHER; note = 2'-deoxy-2'-fluoro-adenosine-3'-phosphate
  modified_base 17: mod_base = OTHER; note = 2'-O-methyl-adenosine-3'-phosphate
  modified_base 18: mod_base = OTHER; note = 2'-O-methyl-uridine-3'-phosphate
  modified_base 19: mod_base = OTHER; note = 2'-O-methyl-cytidine-3'-phosphorothioate
  modified_base 20: mod_base = OTHER; note = 2'-O-methyl-uridine-3'-phosphorothioate
  modified_base 21: mod_base = OTHER; note = 2'-O-methyl-uridine-3'-phosphate
tagccatgttgaggaaatctt

SEQ ID NO: 2107 - RNA, 21 nt, synthetic construct
  source 1..21: mol_type = other RNA
  modified_base 1: mod_base = OTHER; note = 2'-O-methyl-uridine-3'-phosphorothioate
  modified_base 2: mod_base = OTHER; note = 2'-deoxy-2'-fluoro-guanosine-3'-phosphorothioate
  modified_base 3: mod_base = OTHER; note = 2'-O-methyl-adenosine-3'-phosphate
  modified_base 4: mod_base = OTHER; note = 2'-O-methyl-guanosine-3'-phosphate
  modified_base 5: mod_base = OTHER; note = 2'-O-methyl-cytidine-3'-phosphate
  modified_base 6: mod_base = OTHER; note = 2'-deoxy-2'-fluoro-cytidine-3'-phosphate
  modified_base 7: mod_base = OTHER; note = 2'-O-methyl-adenosine-3'-phosphate
  modified_base 8: mod_base = OTHER; note = 2'-deoxy-2'-fluoro-uridine-3'-phosphate
  modified_base 9: mod_base = OTHER; note = 2'-deoxy-2'-fluoro-guanosine-3'-phosphate
  modified_base 10: mod_base = OTHER; note = 2'-O-methyl-uridine-3'-phosphate
  modified_base 11: mod_base = OTHER; note = 2'-O-methyl-uridine-3'-phosphate
  modified_base 12: mod_base = OTHER; note = 2'-O-methyl-guanosine-3'-phosphate
  modified_base 13: mod_base = OTHER; note = 2'-O-methyl-adenosine-3'-phosphate
  modified_base 14: mod_base = OTHER; note = 2'-deoxy-2'-fluoro-guanosine-3'-phosphate
  modified_base 15: mod_base = OTHER; note = 2'-O-methyl-guanosine-3'-phosphate
  modified_base 16: mod_base = OTHER; note = 2'-deoxy-2'-fluoro-adenosine-3'-phosphate
  modified_base 17: mod_base = OTHER; note = 2'-O-methyl-adenosine-3'-phosphate
  modified_base 18: mod_base = OTHER; note = 2'-O-methyl-adenosine-3'-phosphate
  modified_base 19: mod_base = OTHER; note = 2'-O-methyl-uridine-3'-phosphorothioate
  modified_base 20: mod_base = OTHER; note = 2'-O-methyl-uridine-3'-phosphorothioate
  modified_base 21: mod_base = OTHER; note = 2'-O-methyl-uridine-3'-phosphate
tgagccatgttgaggaaattt

SEQ ID NO: 2108 - RNA, 21 nt, synthetic construct
  source 1..21: mol_type = other RNA
  modified_base 1: mod_base = OTHER; note = 2'-O-methyl-uridine-3'-phosphorothioate
  modified_base 2: mod_base = OTHER; note = 2'-deoxy-2'-fluoro-guanosine-3'-phosphorothioate
  modified_base 3: mod_base = OTHER; note = 2'-O-methyl-uridine-3'-phosphate
  modified_base 4: mod_base = OTHER; note = 2'-O-methyl-guanosine-3'-phosphate
  modified_base 5: mod_base = OTHER; note = 2'-O-methyl-adenosine-3'-phosphate
  modified_base 6: mod_base = OTHER; note = 2'-deoxy-2'-fluoro-guanosine-3'-phosphate
  modified_base 7: mod_base = OTHER; note = 2'-O-methyl-cytidine-3'-phosphate
  modified_base 8: mod_base = OTHER; note = 2'-deoxy-2'-fluoro-cytidine-3'-phosphate
  modified_base 9: mod_base = OTHER; note = 2'-deoxy-2'-fluoro-adenosine-3'-phosphate
  modified_base 10: mod_base = OTHER; note = 2'-O-methyl-uridine-3'-phosphate
  modified_base 11: mod_base = OTHER; note = 2'-O-methyl-guanosine-3'-phosphate
  modified_base 12: mod_base = OTHER; note = 2'-O-methyl-uridine-3'-phosphate
  modified_base 13: mod_base = OTHER; note = 2'-O-methyl-uridine-3'-phosphate
  modified_base 14: mod_base = OTHER; note = 2'-deoxy-2'-fluoro-guanosine-3'-phosphate
  modified_base 15: mod_base = OTHER; note = 2'-O-methyl-adenosine-3'-phosphate
  modified_base 16: mod_base = OTHER; note = 2'-deoxy-2'-fluoro-guanosine-3'-phosphate
  modified_base 17: mod_base = OTHER; note = 2'-O-methyl-guanosine-3'-phosphate
  modified_base 18: mod_base = OTHER; note = 2'-O-methyl-adenosine-3'-phosphate
  modified_base 19: mod_base = OTHER; note = 2'-O-methyl-adenosine-3'-phosphorothioate
  modified_base 20: mod_base = OTHER; note = 2'-O-methyl-uridine-3'-phosphorothioate
  modified_base 21: mod_base = OTHER; note = 2'-O-methyl-uridine-3'-phosphate
tgtgagccatgttgaggaatt

SEQ ID NO: 2109 - RNA, 21 nt, synthetic construct
  source 1..21: mol_type = other RNA
  modified_base 1: mod_base = OTHER; note = 2'-O-methyl-uridine-3'-phosphorothioate
  modified_base 2: mod_base = OTHER; note = 2'-deoxy-2'-fluoro-uridine-3'-phosphorothioate
  modified_base 3: mod_base = OTHER; note = 2'-O-methyl-guanosine-3'-phosphate
  modified_base 4: mod_base = OTHER; note = 2'-O-methyl-uridine-3'-phosphate
  modified_base 5: mod_base = OTHER; note = 2'-O-methyl-guanosine-3'-phosphate
  modified_base 6: mod_base = OTHER; note = 2'-deoxy-2'-fluoro-adenosine-3'-phosphate
  modified_base 7: mod_base = OTHER; note = 2'-O-methyl-guanosine-3'-phosphate
  modified_base 8: mod_base = OTHER; note = 2'-deoxy-2'-fluoro-cytidine-3'-phosphate
  modified_base 9: mod_base = OTHER; note = 2'-deoxy-2'-fluoro-cytidine-3'-phosphate
  modified_base 10: mod_base = OTHER; note = 2'-O-methyl-adenosine-3'-phosphate
  modified_base 11: mod_base = OTHER; note = 2'-O-methyl-uridine-3'-phosphate
  modified_base 12: mod_base = OTHER; note = 2'-O-methyl-guanosine-3'-phosphate
  modified_base 13: mod_base = OTHER; note = 2'-O-methyl-uridine-3'-phosphate
  modified_base 14: mod_base = OTHER; note = 2'-deoxy-2'-fluoro-uridine-3'-phosphate
  modified_base 15: mod_base = OTHER; note = 2'-O-methyl-guanosine-3'-phosphate
  modified_base 16: mod_base = OTHER; note = 2'-deoxy-2'-fluoro-adenosine-3'-phosphate
  modified_base 17: mod_base = OTHER; note = 2'-O-methyl-guanosine-3'-phosphate
  modified_base 18: mod_base = OTHER; note = 2'-O-methyl-guanosine-3'-phosphate
  modified_base 19: mod_base = OTHER; note = 2'-O-methyl-adenosine-3'-phosphorothioate
  modified_base 20: mod_base = OTHER; note = 2'-O-methyl-uridine-3'-phosphorothioate
  modified_base 21: mod_base = OTHER; note = 2'-O-methyl-uridine-3'-phosphate
ttgtgagccatgttgaggatt

SEQ ID NO: 2110 - RNA, 21 nt, synthetic construct
  source 1..21: mol_type = other RNA
  modified_base 1: mod_base = OTHER; note = 2'-O-methyl-uridine-3'-phosphorothioate
  modified_base 2: mod_base = OTHER; note = 2'-deoxy-2'-fluoro-adenosine-3'-phosphorothioate
  modified_base 3: mod_base = OTHER; note = 2'-O-methyl-adenosine-3'-phosphate
  modified_base 4: mod_base = OTHER; note = 2'-O-methyl-cytidine-3'-phosphate
  modified_base 5: mod_base = OTHER; note = 2'-O-methyl-uridine-3'-phosphate
  modified_base 6: mod_base = OTHER; note = 2'-deoxy-2'-fluoro-uridine-3'-phosphate
  modified_base 7: mod_base = OTHER; note = 2'-O-methyl-guanosine-3'-phosphate
  modified_base 8: mod_base = OTHER; note = 2'-deoxy-2'-fluoro-uridine-3'-phosphate
  modified_base 9: mod_base = OTHER; note = 2'-deoxy-2'-fluoro-uridine-3'-phosphate
  modified_base 10: mod_base = OTHER; note = 2'-O-methyl-guanosine-3'-phosphate
  modified_base 11: mod_base = OTHER; note = 2'-O-methyl-guanosine-3'-phosphate
  modified_base 12: mod_base = OTHER; note = 2'-O-methyl-cytidine-3'-phosphate
  modified_base 13: mod_base = OTHER; note = 2'-O-methyl-adenosine-3'-phosphate
  modified_base 14: mod_base = OTHER; note = 2'-deoxy-2'-fluoro-guanosine-3'-phosphate
  modified_base 15: mod_base = OTHER; note = 2'-O-methyl-uridine-3'-phosphate
  modified_base 16: mod_base = OTHER; note = 2'-deoxy-2'-fluoro-guanosine-3'-phosphate
  modified_base 17: mod_base = OTHER; note = 2'-O-methyl-cytidine-3'-phosphate
  modified_base 18: mod_base = OTHER; note = 2'-O-methyl-adenosine-3'-phosphate
  modified_base 19: mod_base = OTHER; note = 2'-O-methyl-guanosine-3'-phosphorothioate
  modified_base 20: mod_base = OTHER; note = 2'-O-methyl-uridine-3'-phosphorothioate
  modified_base 21: mod_base = OTHER; note = 2'-O-methyl-uridine-3'-phosphate
taacttgttggcagtgcagtt

SEQ ID NO: 2111 - RNA, 21 nt, synthetic construct
  source 1..21: mol_type = other RNA
  modified_base 1: mod_base = OTHER; note = 2'-O-methyl-uridine-3'-phosphorothioate
  modified_base 2: mod_base = OTHER; note = 2'-deoxy-2'-fluoro-guanosine-3'-phosphorothioate
  modified_base 3: mod_base = OTHER; note = 2'-O-methyl-adenosine-3'-phosphate
  modified_base 4: mod_base = OTHER; note = 2'-O-methyl-adenosine-3'-phosphate
  modified_base 5: mod_base = OTHER; note = 2'-O-methyl-cytidine-3'-phosphate
  modified_base 6: mod_base = OTHER; note = 2'-deoxy-2'-fluoro-uridine-3'-phosphate
  modified_base 7: mod_base = OTHER; note = 2'-O-methyl-uridine-3'-phosphate
  modified_base 8: mod_base = OTHER; note = 2'-deoxy-2'-fluoro-guanosine-3'-phosphate
  modified_base 9: mod_base = OTHER; note = 2'-deoxy-2'-fluoro-uridine-3'-phosphate
  modified_base 10: mod_base = OTHER; note = 2'-O-methyl-uridine-3'-phosphate
  modified_base 11: mod_base = OTHER; note = 2'-O-methyl-guanosine-3'-phosphate
  modified_base 12: mod_base = OTHER; note = 2'-O-methyl-guanosine-3'-phosphate
  modified_base 13: mod_base = OTHER; note = 2'-O-methyl-cytidine-3'-phosphate
  modified_base 14: mod_base = OTHER; note = 2'-deoxy-2'-fluoro-adenosine-3'-phosphate
  modified_base 15: mod_base = OTHER; note = 2'-O-methyl-guanosine-3'-phosphate
  modified_base 16: mod_base = OTHER; note = 2'-deoxy-2'-fluoro-uridine-3'-phosphate
  modified_base 17: mod_base = OTHER; note = 2'-O-methyl-guanosine-3'-phosphate
  modified_base 18: mod_base = OTHER; note = 2'-O-methyl-cytidine-3'-phosphate
  modified_base 19: mod_base = OTHER; note = 2'-O-methyl-adenosine-3'-phosphorothioate
  modified_base 20: mod_base = OTHER; note = 2'-O-methyl-uridine-3'-phosphorothioate
  modified_base 21: mod_base = OTHER; note = 2'-O-methyl-uridine-3'-phosphate
tgaacttgttggcagtgcatt

SEQ ID NO: 2112 - RNA, 21 nt, synthetic construct
  source 1..21: mol_type = other RNA
  modified_base 1: mod_base = OTHER; note = 2'-O-methyl-uridine-3'-phosphorothioate
  modified_base 2: mod_base = OTHER; note = 2'-deoxy-2'-fluoro-guanosine-3'-phosphorothioate
  modified_base 3: mod_base = OTHER; note = 2'-O-methyl-uridine-3'-phosphate
  modified_base 4: mod_base = OTHER; note = 2'-O-methyl-guanosine-3'-phosphate
  modified_base 5: mod_base = OTHER; note = 2'-O-methyl-adenosine-3'-phosphate
  modified_base 6: mod_base = OTHER; note = 2'-deoxy-2'-fluoro-adenosine-3'-phosphate
  modified_base 7: mod_base = OTHER; note = 2'-O-methyl-cytidine-3'-phosphate
  modified_base 8: mod_base = OTHER; note = 2'-deoxy-2'-fluoro-uridine-3'-phosphate
  modified_base 9: mod_base = OTHER; note = 2'-deoxy-2'-fluoro-uridine-3'-phosphate
  modified_base 10: mod_base = OTHER; note = 2'-O-methyl-guanosine-3'-phosphate
  modified_base 11: mod_base = OTHER; note = 2'-O-methyl-uridine-3'-phosphate
  modified_base 12: mod_base = OTHER; note = 2'-O-methyl-uridine-3'-phosphate
  modified_base 13: mod_base = OTHER; note = 2'-O-methyl-guanosine-3'-phosphate
  modified_base 14: mod_base = OTHER; note = 2'-deoxy-2'-fluoro-guanosine-3'-phosphate
  modified_base 15: mod_base = OTHER; note = 2'-O-methyl-cytidine-3'-phosphate
  modified_base 16: mod_base = OTHER; note = 2'-deoxy-2'-fluoro-adenosine-3'-phosphate
  modified_base 17: mod_base = OTHER; note = 2'-O-methyl-guanosine-3'-phosphate
  modified_base 18: mod_base = OTHER; note = 2'-O-methyl-uridine-3'-phosphate
  modified_base 19: mod_base = OTHER; note = 2'-O-methyl-guanosine-3'-phosphorothioate
  modified_base 20: mod_base = OTHER; note = 2'-O-methyl-uridine-3'-phosphorothioate
  modified_base 21: mod_base = OTHER; note = 2'-O-methyl-uridine-3'-phosphate
tgtgaacttgttggcagtgtt

SEQ ID NO: 2113 - RNA, 21 nt, synthetic construct
  source 1..21: mol_type = other RNA
  modified_base 1: mod_base = OTHER; note = 2'-O-methyl-uridine-3'-phosphorothioate
  modified_base 2: mod_base = OTHER; note = 2'-deoxy-2'-fluoro-adenosine-3'-phosphorothioate
  modified_base 3: mod_base = OTHER; note = 2'-O-methyl-guanosine-3'-phosphate
  modified_base 4: mod_base = OTHER; note = 2'-O-methyl-uridine-3'-phosphate
  modified_base 5: mod_base = OTHER; note = 2'-O-methyl-guanosine-3'-phosphate
  modified_base 6: mod_base = OTHER; note = 2'-deoxy-2'-fluoro-adenosine-3'-phosphate
  modified_base 7: mod_base = OTHER; note = 2'-O-methyl-adenosine-3'-phosphate
  modified_base 8: mod_base = OTHER; note = 2'-deoxy-2'-fluoro-cytidine-3'-phosphate
  modified_base 9: mod_base = OTHER; note = 2'-deoxy-2'-fluoro-uridine-3'-phosphate
  modified_base 10: mod_base = OTHER; note = 2'-O-methyl-uridine-3'-phosphate
  modified_base 11: mod_base = OTHER; note = 2'-O-methyl-guanosine-3'-phosphate
  modified_base 12: mod_base = OTHER; note = 2'-O-methyl-uridine-3'-phosphate
  modified_base 13: mod_base = OTHER; note = 2'-O-methyl-uridine-3'-phosphate
  modified_base 14: mod_base = OTHER; note = 2'-deoxy-2'-fluoro-guanosine-3'-phosphate
  modified_base 15: mod_base = OTHER; note = 2'-O-methyl-guanosine-3'-phosphate
  modified_base 16: mod_base = OTHER; note = 2'-deoxy-2'-fluoro-cytidine-3'-phosphate
  modified_base 17: mod_base = OTHER; note = 2'-O-methyl-adenosine-3'-phosphate
  modified_base 18: mod_base = OTHER; note = 2'-O-methyl-guanosine-3'-phosphate
  modified_base 19: mod_base = OTHER; note = 2'-O-methyl-uridine-3'-phosphorothioate
  modified_base 20: mod_base = OTHER; note = 2'-O-methyl-uridine-3'-phosphorothioate
  modified_base 21: mod_base = OTHER; note = 2'-O-methyl-uridine-3'-phosphate
tagtgaacttgttggcagttt

SEQ ID NO: 2114 - RNA, 21 nt, synthetic construct
  source 1..21: mol_type = other RNA
  modified_base 1: mod_base = OTHER; note = 2'-O-methyl-uridine-3'-phosphorothioate
  modified_base 2: mod_base = OTHER; note = 2'-deoxy-2'-fluoro-adenosine-3'-phosphorothioate
  modified_base 3: mod_base = OTHER; note = 2'-O-methyl-adenosine-3'-phosphate
  modified_base 4: mod_base = OTHER; note = 2'-O-methyl-guanosine-3'-phosphate
  modified_base 5: mod_base = OTHER; note = 2'-O-methyl-uridine-3'-phosphate
  modified_base 6: mod_base = OTHER; note = 2'-deoxy-2'-fluoro-guanosine-3'-phosphate
  modified_base 7: mod_base = OTHER; note = 2'-O-methyl-adenosine-3'-phosphate
  modified_base 8: mod_base = OTHER; note = 2'-deoxy-2'-fluoro-adenosine-3'-phosphate
  modified_base 9: mod_base = OTHER; note = 2'-deoxy-2'-fluoro-cytidine-3'-phosphate
  modified_base 10: mod_base = OTHER; note = 2'-O-methyl-uridine-3'-phosphate
  modified_base 11: mod_base = OTHER; note = 2'-O-methyl-uridine-3'-phosphate
  modified_base 12: mod_base = OTHER; note = 2'-O-methyl-guanosine-3'-phosphate
  modified_base 13: mod_base = OTHER; note = 2'-O-methyl-uridine-3'-phosphate
  modified_base 14: mod_base = OTHER; note = 2'-deoxy-2'-fluoro-uridine-3'-phosphate
  modified_base 15: mod_base = OTHER; note = 2'-O-methyl-guanosine-3'-phosphate
  modified_base 16: mod_base = OTHER; note = 2'-deoxy-2'-fluoro-guanosine-3'-phosphate
  modified_base 17: mod_base = OTHER; note = 2'-O-methyl-cytidine-3'-phosphate
  modified_base 18: mod_base = OTHER; note = 2'-O-methyl-adenosine-3'-phosphate
  modified_base 19: mod_base = OTHER; note = 2'-O-methyl-guanosine-3'-phosphorothioate
  modified_base 20: mod_base = OTHER; note = 2'-O-methyl-uridine-3'-phosphorothioate
  modified_base 21: mod_base = OTHER; note = 2'-O-methyl-uridine-3'-phosphate
taagtgaacttgttggcagtt

SEQ ID NO: 2115 - RNA, 21 nt, synthetic construct
  source 1..21: mol_type = other RNA
  modified_base 1: mod_base = OTHER; note = 2'-O-methyl-uridine-3'-phosphorothioate
  modified_base 2: mod_base = OTHER; note = 2'-deoxy-2'-fluoro-adenosine-3'-phosphorothioate
  modified_base 3: mod_base = OTHER; note = 2'-O-methyl-uridine-3'-phosphate
  modified_base 4: mod_base = OTHER; note = 2'-O-methyl-guanosine-3'-phosphate
  modified_base 5: mod_base = OTHER; note = 2'-O-methyl-adenosine-3'-phosphate
  modified_base 6: mod_base = OTHER; note = 2'-deoxy-2'-fluoro-adenosine-3'-phosphate
  modified_base 7: mod_base = OTHER; note = 2'-O-methyl-guanosine-3'-phosphate
  modified_base 8: mod_base = OTHER; note = 2'-deoxy-2'-fluoro-uridine-3'-phosphate
  modified_base 9: mod_base = OTHER; note = 2'-deoxy-2'-fluoro-guanosine-3'-phosphate
  modified_base 10: mod_base = OTHER; note = 2'-O-methyl-adenosine-3'-phosphate
  modified_base 11: mod_base = OTHER; note = 2'-O-methyl-adenosine-3'-phosphate
  modified_base 12: mod_base = OTHER; note = 2'-O-methyl-cytidine-3'-phosphate
  modified_base 13: mod_base = OTHER; note = 2'-O-methyl-uridine-3'-phosphate
  modified_base 14: mod_base = OTHER; note = 2'-deoxy-2'-fluoro-uridine-3'-phosphate
  modified_base 15: mod_base = OTHER; note = 2'-O-methyl-guanosine-3'-phosphate
  modified_base 16: mod_base = OTHER; note = 2'-deoxy-2'-fluoro-uridine-3'-phosphate
  modified_base 17: mod_base = OTHER; note = 2'-O-methyl-uridine-3'-phosphate
  modified_base 18: mod_base = OTHER; note = 2'-O-methyl-guanosine-3'-phosphate
  modified_base 19: mod_base = OTHER; note = 2'-O-methyl-guanosine-3'-phosphorothioate
  modified_base 20: mod_base = OTHER; note = 2'-O-methyl-uridine-3'-phosphorothioate
  modified_base 21: mod_base = OTHER; note = 2'-O-methyl-uridine-3'-phosphate
tatgaagtgaacttgttggtt

SEQ ID NO: 2116 - RNA, 21 nt, synthetic construct
  source 1..21: mol_type = other RNA
  modified_base 1: mod_base = OTHER; note = 2'-O-methyl-uridine-3'-phosphorothioate
  modified_base 2: mod_base = OTHER; note = 2'-deoxy-2'-fluoro-uridine-3'-phosphorothioate
  modified_base 3: mod_base = OTHER; note = 2'-O-methyl-adenosine-3'-phosphate
  modified_base 4: mod_base = OTHER; note = 2'-O-methyl-uridine-3'-phosphate
  modified_base 5: mod_base = OTHER; note = 2'-O-methyl-guanosine-3'-phosphate
  modified_base 6: mod_base = OTHER; note = 2'-deoxy-2'-fluoro-adenosine-3'-phosphate
  modified_base 7: mod_base = OTHER; note = 2'-O-methyl-adenosine-3'-phosphate
  modified_base 8: mod_base = OTHER; note = 2'-deoxy-2'-fluoro-guanosine-3'-phosphate
  modified_base 9: mod_base = OTHER; note = 2'-deoxy-2'-fluoro-uridine-3'-phosphate
  modified_base 10: mod_base = OTHER; note = 2'-O-methyl-guanosine-3'-phosphate
  modified_base 11: mod_base = OTHER; note = 2'-O-methyl-adenosine-3'-phosphate
  modified_base 12: mod_base = OTHER; note = 2'-O-methyl-adenosine-3'-phosphate
  modified_base 13: mod_base = OTHER; note = 2'-O-methyl-cytidine-3'-phosphate
  modified_base 14: mod_base = OTHER; note = 2'-deoxy-2'-fluoro-uridine-3'-phosphate
  modified_base 15: mod_base = OTHER; note = 2'-O-methyl-uridine-3'-phosphate
  modified_base 16: mod_base = OTHER; note = 2'-deoxy-2'-fluoro-guanosine-3'-phosphate
  modified_base 17: mod_base = OTHER; note = 2'-O-methyl-uridine-3'-phosphate
  modified_base 18: mod_base = OTHER; note = 2'-O-methyl-uridine-3'-phosphate
  modified_base 19: mod_base = OTHER; note = 2'-O-methyl-guanosine-3'-phosphorothioate
  modified_base 20: mod_base = OTHER; note = 2'-O-methyl-uridine-3'-phosphorothioate
  modified_base 21: mod_base = OTHER; note = 2'-O-methyl-uridine-3'-phosphate
ttatgaagtgaacttgttgtt

SEQ ID NO: 2117 - RNA, 21 nt, synthetic construct
  source 1..21: mol_type = other RNA
  modified_base 1: mod_base = OTHER; note = 2'-O-methyl-uridine-3'-phosphorothioate
  modified_base 2: mod_base = OTHER; note = 2'-deoxy-2'-fluoro-adenosine-3'-phosphorothioate
  modified_base 3: mod_base = OTHER; note = 2'-O-methyl-uridine-3'-phosphate
  modified_base 4: mod_base = OTHER; note = 2'-O-methyl-adenosine-3'-phosphate
  modified_base 5: mod_base = OTHER; note = 2'-O-methyl-uridine-3'-phosphate
  modified_base 6: mod_base = OTHER; note = 2'-deoxy-2'-fluoro-guanosine-3'-phosphate
  modified_base 7: mod_base = OTHER; note = 2'-O-methyl-adenosine-3'-phosphate
  modified_base 8: mod_base = OTHER; note = 2'-deoxy-2'-fluoro-adenosine-3'-phosphate
  modified_base 9: mod_base = OTHER; note = 2'-deoxy-2'-fluoro-guanosine-3'-phosphate
  modified_base 10: mod_base = OTHER; note = 2'-O-methyl-uridine-3'-phosphate
  modified_base 11: mod_base = OTHER; note = 2'-O-methyl-guanosine-3'-phosphate
  modified_base 12: mod_base = OTHER; note = 2'-O-methyl-adenosine-3'-phosphate
  modified_base 13: mod_base = OTHER; note = 2'-O-methyl-adenosine-3'-phosphate
  modified_base 14: mod_base = OTHER; note = 2'-deoxy-2'-fluoro-cytidine-3'-phosphate
  modified_base 15: mod_base = OTHER; note = 2'-O-methyl-uridine-3'-phosphate
  modified_base 16: mod_base = OTHER; note = 2'-deoxy-2'-fluoro-uridine-3'-phosphate
  modified_base 17: mod_base = OTHER; note = 2'-O-methyl-guanosine-3'-phosphate
  modified_base 18: mod_base = OTHER; note = 2'-O-methyl-uridine-3'-phosphate
  modified_base 19: mod_base = OTHER; note = 2'-O-methyl-uridine-3'-phosphorothioate
  modified_base 20: mod_base = OTHER; note = 2'-O-methyl-uridine-3'-phosphorothioate
  modified_base 21: mod_base = OTHER; note = 2'-O-methyl-uridine-3'-phosphate
tatatgaagtgaacttgtttt

SEQ ID NO: 2118 - RNA, 21 nt, synthetic construct
  source 1..21: mol_type = other RNA
  modified_base 1: mod_base = OTHER; note = 2'-O-methyl-uridine-3'-phosphorothioate
  modified_base 2: mod_base = OTHER; note = 2'-deoxy-2'-fluoro-uridine-3'-phosphorothioate
  modified_base 3: mod_base = OTHER; note = 2'-O-methyl-adenosine-3'-phosphate
  modified_base 4: mod_base = OTHER; note = 2'-O-methyl-uridine-3'-phosphate
  modified_base 5: mod_base = OTHER; note = 2'-O-methyl-adenosine-3'-phosphate
  modified_base 6: mod_base = OTHER; note = 2'-deoxy-2'-fluoro-uridine-3'-phosphate
  modified_base 7: mod_base = OTHER; note = 2'-O-methyl-guanosine-3'-phosphate
  modified_base 8: mod_base = OTHER; note = 2'-deoxy-2'-fluoro-adenosine-3'-phosphate
  modified_base 9: mod_base = OTHER; note = 2'-deoxy-2'-fluoro-adenosine-3'-phosphate
  modified_base 10: mod_base = OTHER; note = 2'-O-methyl-guanosine-3'-phosphate
  modified_base 11: mod_base = OTHER; note = 2'-O-methyl-uridine-3'-phosphate
  modified_base 12: mod_base = OTHER; note = 2'-O-methyl-guanosine-3'-phosphate
  modified_base 13: mod_base = OTHER; note = 2'-O-methyl-adenosine-3'-phosphate
  modified_base 14: mod_base = OTHER; note = 2'-deoxy-2'-fluoro-adenosine-3'-phosphate
  modified_base 15: mod_base = OTHER; note = 2'-O-methyl-cytidine-3'-phosphate
  modified_base 16: mod_base = OTHER; note = 2'-deoxy-2'-fluoro-uridine-3'-phosphate
  modified_base 17: mod_base = OTHER; note = 2'-O-methyl-uridine-3'-phosphate
  modified_base 18: mod_base = OTHER; note = 2'-O-methyl-guanosine-3'-phosphate
  modified_base 19: mod_base = OTHER; note = 2'-O-methyl-uridine-3'-phosphorothioate
  modified_base 20: mod_base = OTHER; note = 2'-O-methyl-uridine-3'-phosphorothioate
  modified_base 21: mod_base = OTHER; note = 2'-O-methyl-uridine-3'-phosphate
ttatatgaagtgaacttgttt

SEQ ID NO: 2119 - RNA, 21 nt, synthetic construct
  source 1..21: mol_type = other RNA
  modified_base 1: mod_base = OTHER; note = 2'-O-methyl-uridine-3'-phosphorothioate
  modified_base 2: mod_base = OTHER; note = 2'-deoxy-2'-fluoro-adenosine-3'-phosphorothioate
  modified_base 3: mod_base = OTHER; note = 2'-O-methyl-uridine-3'-phosphate
  modified_base 4: mod_base = OTHER; note = 2'-O-methyl-guanosine-3'-phosphate
  modified_base 5: mod_base = OTHER; note = 2'-O-methyl-cytidine-3'-phosphate
  modified_base 6: mod_base = OTHER; note = 2'-deoxy-2'-fluoro-uridine-3'-phosphate
  modified_base 7: mod_base = OTHER; note = 2'-O-methyl-uridine-3'-phosphate
  modified_base 8: mod_base = OTHER; note = 2'-deoxy-2'-fluoro-uridine-3'-phosphate
  modified_base 9: mod_base = OTHER; note = 2'-deoxy-2'-fluoro-adenosine-3'-phosphate
  modified_base 10: mod_base = OTHER; note = 2'-O-methyl-uridine-3'-phosphate
  modified_base 11: mod_base = OTHER; note = 2'-O-methyl-adenosine-3'-phosphate
  modified_base 12: mod_base = OTHER; note = 2'-O-methyl-uridine-3'-phosphate
  modified_base 13: mod_base = OTHER; note = 2'-O-methyl-adenosine-3'-phosphate
  modified_base 14: mod_base = OTHER; note = 2'-deoxy-2'-fluoro-uridine-3'-phosphate
  modified_base 15: mod_base = OTHER; note = 2'-O-methyl-guanosine-3'-phosphate
  modified_base 16: mod_base = OTHER; note = 2'-deoxy-2'-fluoro-adenosine-3'-phosphate
  modified_base 17: mod_base = OTHER; note = 2'-O-methyl-adenosine-3'-phosphate
  modified_base 18: mod_base = OTHER; note = 2'-O-methyl-guanosine-3'-phosphate
  modified_base 19: mod_base = OTHER; note = 2'-O-methyl-uridine-3'-phosphorothioate
  modified_base 20: mod_base = OTHER; note = 2'-O-methyl-uridine-3'-phosphorothioate
  modified_base 21: mod_base = OTHER; note = 2'-O-methyl-uridine-3'-phosphate
tatgctttatatatgaagttt

SEQ ID NO: 2120 - RNA, 21 nt, synthetic construct
  source 1..21: mol_type = other RNA
  modified_base 1: mod_base = OTHER; note = 2'-O-methyl-uridine-3'-phosphorothioate
  modified_base 2: mod_base = OTHER; note = 2'-deoxy-2'-fluoro-uridine-3'-phosphorothioate
  modified_base 3: mod_base = OTHER; note = 2'-O-methyl-uridine-3'-phosphate
  modified_base 4: mod_base = OTHER; note = 2'-O-methyl-guanosine-3'-phosphate
  modified_base 5: mod_base = OTHER; note = 2'-O-methyl-adenosine-3'-phosphate
  modified_base 6: mod_base = OTHER; note = 2'-deoxy-2'-fluoro-uridine-3'-phosphate
  modified_base 7: mod_base = OTHER; note = 2'-O-methyl-adenosine-3'-phosphate
  modified_base 8: mod_base = OTHER; note = 2'-deoxy-2'-fluoro-cytidine-3'-phosphate
  modified_base 9: mod_base = OTHER; note = 2'-deoxy-2'-fluoro-uridine-3'-phosphate
  modified_base 10: mod_base = OTHER; note = 2'-O-methyl-uridine-3'-phosphate
  modified_base 11: mod_base = OTHER; note = 2'-O-methyl-guanosine-3'-phosphate
  modified_base 12: mod_base = OTHER; note = 2'-O-methyl-guanosine-3'-phosphate
  modified_base 13: mod_base = OTHER; note = 2'-O-methyl-uridine-3'-phosphate
  modified_base 14: mod_base = OTHER; note = 2'-deoxy-2'-fluoro-guanosine-3'-phosphate
  modified_base 15: mod_base = OTHER; note = 2'-O-methyl-adenosine-3'-phosphate
  modified_base 16: mod_base = OTHER; note = 2'-deoxy-2'-fluoro-adenosine-3'-phosphate
  modified_base 17: mod_base = OTHER; note = 2'-O-methyl-guanosine-3'-phosphate
  modified_base 18: mod_base = OTHER; note = 2'-O-methyl-adenosine-3'-phosphate
  modified_base 19: mod_base = OTHER; note = 2'-O-methyl-cytidine-3'-phosphorothioate
  modified_base 20: mod_base = OTHER; note = 2'-O-methyl-uridine-3'-phosphorothioate
  modified_base 21: mod_base = OTHER; note = 2'-O-methyl-uridine-3'-phosphate
tttgatacttggtgaagactt

SEQ ID NO: 2121 - RNA, 21 nt, synthetic construct
  source 1..21: mol_type = other RNA
  modified_base 1: mod_base = OTHER; note = 2'-O-methyl-uridine-3'-phosphorothioate
  modified_base 2: mod_base = OTHER; note = 2'-deoxy-2'-fluoro-uridine-3'-phosphorothioate
  modified_base 3: mod_base = OTHER; note = 2'-O-methyl-uridine-3'-phosphate
  modified_base 4: mod_base = OTHER; note = 2'-O-methyl-uridine-3'-phosphate
  modified_base 5: mod_base = OTHER; note = 2'-O-methyl-guanosine-3'-phosphate
  modified_base 6: mod_base = OTHER; note = 2'-deoxy-2'-fluoro-adenosine-3'-phosphate
  modified_base 7: mod_base = OTHER; note = 2'-O-methyl-uridine-3'-phosphate
  modified_base 8: mod_base = OTHER; note = 2'-deoxy-2'-fluoro-adenosine-3'-phosphate
  modified_base 9: mod_base = OTHER; note = 2'-deoxy-2'-fluoro-cytidine-3'-phosphate
  modified_base 10: mod_base = OTHER; note = 2'-O-methyl-uridine-3'-phosphate
  modified_base 11: mod_base = OTHER; note = 2'-O-methyl-uridine-3'-phosphate
  modified_base 12: mod_base = OTHER; note = 2'-O-methyl-guanosine-3'-phosphate
  modified_base 13: mod_base = OTHER; note = 2'-O-methyl-guanosine-3'-phosphate
  modified_base 14: mod_base = OTHER; note = 2'-deoxy-2'-fluoro-uridine-3'-phosphate
  modified_base 15: mod_base = OTHER; note = 2'-O-methyl-guanosine-3'-phosphate
  modified_base 16: mod_base = OTHER; note = 2'-deoxy-2'-fluoro-adenosine-3'-phosphate
  modified_base 17: mod_base = OTHER; note = 2'-O-methyl-adenosine-3'-phosphate
  modified_base 18: mod_base = OTHER; note = 2'-O-methyl-guanosine-3'-phosphate
  modified_base 19: mod_base = OTHER; note = 2'-O-methyl-adenosine-3'-phosphorothioate
  modified_base 20: mod_base = OTHER; note = 2'-O-methyl-uridine-3'-phosphorothioate
  modified_base 21: mod_base = OTHER; note = 2'-O-methyl-uridine-3'-phosphate
ttttgatacttggtgaagatt

SEQ ID NO: 2122 - RNA, 21 nt, synthetic construct
  source 1..21: mol_type = other RNA
  modified_base 1: mod_base = OTHER; note = 2'-O-methyl-uridine-3'-phosphorothioate
  modified_base 2: mod_base = OTHER; note = 2'-deoxy-2'-fluoro-cytidine-3'-phosphorothioate
  modified_base 3: mod_base = OTHER; note = 2'-O-methyl-uridine-3'-phosphate
  modified_base 4: mod_base = OTHER; note = 2'-O-methyl-uridine-3'-phosphate
  modified_base 5: mod_base = OTHER; note = 2'-O-methyl-uridine-3'-phosphate
  modified_base 6: mod_base = OTHER; note = 2'-deoxy-2'-fluoro-guanosine-3'-phosphate
  modified_base 7: mod_base = OTHER; note = 2'-O-methyl-adenosine-3'-phosphate
  modified_base 8: mod_base = OTHER; note = 2'-deoxy-2'-fluoro-uridine-3'-phosphate
  modified_base 9: mod_base = OTHER; note = 2'-deoxy-2'-fluoro-adenosine-3'-phosphate
  modified_base 10: mod_base = OTHER; note = 2'-O-methyl-cytidine-3'-phosphate
  modified_base 11: mod_base = OTHER; note = 2'-O-methyl-uridine-3'-phosphate
  modified_base 12: mod_base = OTHER; note = 2'-O-methyl-uridine-3'-phosphate
  modified_base 13: mod_base = OTHER; note = 2'-O-methyl-guanosine-3'-phosphate
  modified_base 14: mod_base = OTHER; note = 2'-deoxy-2'-fluoro-guanosine-3'-phosphate
  modified_base 15: mod_base = OTHER; note = 2'-O-methyl-uridine-3'-phosphate
  modified_base 16: mod_base = OTHER; note = 2'-deoxy-2'-fluoro-guanosine-3'-phosphate
  modified_base 17: mod_base = OTHER; note = 2'-O-methyl-adenosine-3'-phosphate
  modified_base 18: mod_base = OTHER; note = 2'-O-methyl-adenosine-3'-phosphate
  modified_base 19: mod_base = OTHER; note = 2'-O-methyl-guanosine-3'-phosphorothioate
  modified_base 20: mod_base = OTHER; note = 2'-O-methyl-uridine-3'-phosphorothioate
  modified_base 21: mod_base = OTHER; note = 2'-O-methyl-uridine-3'-phosphate
tctttgatacttggtgaagtt

SEQ ID NO: 2123 - RNA, 21 nt, synthetic construct
  source 1..21: mol_type = other RNA
  modified_base 1: mod_base = OTHER; note = 2'-O-methyl-uridine-3'-phosphorothioate
  modified_base 2: mod_base = OTHER; note = 2'-deoxy-2'-fluoro-adenosine-3'-phosphorothioate
  modified_base 3: mod_base = OTHER; note = 2'-O-methyl-cytidine-3'-phosphate
  modified_base 4: mod_base = OTHER; note = 2'-O-methyl-uridine-3'-phosphate
  modified_base 5: mod_base = OTHER; note = 2'-O-methyl-uridine-3'-phosphate
  modified_base 6: mod_base = OTHER; note = 2'-deoxy-2'-fluoro-uridine-3'-phosphate
  modified_base 7: mod_base = OTHER; note = 2'-O-methyl-guanosine-3'-phosphate
  modified_base 8: mod_base = OTHER; note = 2'-deoxy-2'-fluoro-adenosine-3'-phosphate
  modified_base 9: mod_base = OTHER; note = 2'-deoxy-2'-fluoro-uridine-3'-phosphate
  modified_base 10: mod_base = OTHER; note = 2'-O-methyl-adenosine-3'-phosphate
  modified_base 11: mod_base = OTHER; note = 2'-O-methyl-cytidine-3'-phosphate
  modified_base 12: mod_base = OTHER; note = 2'-O-methyl-uridine-3'-phosphate
  modified_base 13: mod_base = OTHER; note = 2'-O-methyl-uridine-3'-phosphate
  modified_base 14: mod_base = OTHER; note = 2'-deoxy-2'-fluoro-guanosine-3'-phosphate
  modified_base 15: mod_base = OTHER; note = 2'-O-methyl-guanosine-3'-phosphate
  modified_base 16: mod_base = OTHER; note = 2'-deoxy-2'-fluoro-uridine-3'-phosphate
  modified_base 17: mod_base = OTHER; note = 2'-O-methyl-guanosine-3'-phosphate
  modified_base 18: mod_base = OTHER; note = 2'-O-methyl-adenosine-3'-phosphate
  modified_base 19: mod_base = OTHER; note = 2'-O-methyl-adenosine-3'-phosphorothioate
  modified_base 20: mod_base = OTHER; note = 2'-O-methyl-uridine-3'-phosphorothioate
  modified_base 21: mod_base = OTHER; note = 2'-O-methyl-uridine-3'-phosphate
tactttgatacttggtgaatt

SEQ ID NO: 2124 - RNA, 21 nt, synthetic construct
  source 1..21: mol_type = other RNA
  modified_base 1: mod_base = OTHER; note = 2'-O-methyl-uridine-3'-phosphorothioate
  modified_base 2: mod_base = OTHER; note = 2'-deoxy-2'-fluoro-uridine-3'-phosphorothioate
  modified_base 3: mod_base = OTHER; note = 2'-O-methyl-uridine-3'-phosphate
  modified_base 4: mod_base = OTHER; note = 2'-O-methyl-adenosine-3'-phosphate
  modified_base 5: mod_base = OTHER; note = 2'-O-methyl-cytidine-3'-phosphate
  modified_base 6: mod_base = OTHER; note = 2'-deoxy-2'-fluoro-uridine-3'-phosphate
  modified_base 7: mod_base = OTHER; note = 2'-O-methyl-uridine-3'-phosphate
  modified_base 8: mod_base = OTHER; note = 2'-deoxy-2'-fluoro-uridine-3'-phosphate
  modified_base 9: mod_base = OTHER; note = 2'-deoxy-2'-fluoro-guanosine-3'-phosphate
  modified_base 10: mod_base = OTHER; note = 2'-O-methyl-adenosine-3'-phosphate
  modified_base 11: mod_base = OTHER; note = 2'-O-methyl-uridine-3'-phosphate
  modified_base 12: mod_base = OTHER; note = 2'-O-methyl-adenosine-3'-phosphate
  modified_base 13: mod_base = OTHER; note = 2'-O-methyl-cytidine-3'-phosphate
  modified_base 14: mod_base = OTHER; note = 2'-deoxy-2'-fluoro-uridine-3'-phosphate
  modified_base 15: mod_base = OTHER; note = 2'-O-methyl-uridine-3'-phosphate
  modified_base 16: mod_base = OTHER; note = 2'-deoxy-2'-fluoro-guanosine-3'-phosphate
  modified_base 17: mod_base = OTHER; note = 2'-O-methyl-guanosine-3'-phosphate
  modified_base 18: mod_base = OTHER; note = 2'-O-methyl-uridine-3'-phosphate
  modified_base 19: mod_base = OTHER; note = 2'-O-methyl-guanosine-3'-phosphorothioate
  modified_base 20: mod_base = OTHER; note = 2'-O-methyl-uridine-3'-phosphorothioate
  modified_base 21: mod_base = OTHER; note = 2'-O-methyl-uridine-3'-phosphate
tttactttgatacttggtgtt

SEQ ID NO: 2125 - RNA, 21 nt, synthetic construct
  source 1..21: mol_type = other RNA
  modified_base 1: mod_base = OTHER; note = 2'-O-methyl-uridine-3'-phosphorothioate
  modified_base 2: mod_base = OTHER; note = 2'-deoxy-2'-fluoro-uridine-3'-phosphorothioate
  modified_base 3: mod_base = OTHER; note = 2'-O-methyl-uridine-3'-phosphate
  modified_base 4: mod_base = OTHER; note = 2'-O-methyl-adenosine-3'-phosphate
  modified_base 5: mod_base = OTHER; note = 2'-O-methyl-uridine-3'-phosphate
  modified_base 6: mod_base = OTHER; note = 2'-deoxy-2'-fluoro-uridine-3'-phosphate
  modified_base 7: mod_base = OTHER; note = 2'-O-methyl-adenosine-3'-phosphate
  modified_base 8: mod_base = OTHER; note = 2'-deoxy-2'-fluoro-cytidine-3'-phosphate
  modified_base 9: mod_base = OTHER; note = 2'-deoxy-2'-fluoro-uridine-3'-phosphate
  modified_base 10: mod_base = OTHER; note = 2'-O-methyl-uridine-3'-phosphate
  modified_base 11: mod_base = OTHER; note = 2'-O-methyl-uridine-3'-phosphate
  modified_base 12: mod_base = OTHER; note = 2'-O-methyl-guanosine-3'-phosphate
  modified_base 13: mod_base = OTHER; note = 2'-O-methyl-adenosine-3'-phosphate
  modified_base 14: mod_base = OTHER; note = 2'-deoxy-2'-fluoro-uridine-3'-phosphate
  modified_base 15: mod_base = OTHER; note = 2'-O-methyl-adenosine-3'-phosphate
  modified_base 16: mod_base = OTHER; note = 2'-deoxy-2'-fluoro-cytidine-3'-phosphate
  modified_base 17: mod_base = OTHER; note = 2'-O-methyl-uridine-3'-phosphate
  modified_base 18: mod_base = OTHER; note = 2'-O-methyl-uridine-3'-phosphate
  modified_base 19: mod_base = OTHER; note = 2'-O-methyl-guanosine-3'-phosphorothioate
  modified_base 20: mod_base = OTHER; note = 2'-O-methyl-uridine-3'-phosphorothioate
  modified_base 21: mod_base = OTHER; note = 2'-O-methyl-uridine-3'-phosphate
tttattactttgatacttgtt

SEQ ID NO: 2126 - RNA, 21 nt, synthetic construct
  source 1..21: mol_type = other RNA
  modified_base 1: mod_base = OTHER; note = 2'-O-methyl-uridine-3'-phosphorothioate
  modified_base 2: mod_base = OTHER; note = 2'-deoxy-2'-fluoro-guanosine-3'-phosphorothioate
  modified_base 3: mod_base = OTHER; note = 2'-O-methyl-uridine-3'-phosphate
  modified_base 4: mod_base = OTHER; note = 2'-O-methyl-uridine-3'-phosphate
  modified_base 5: mod_base = OTHER; note = 2'-O-methyl-adenosine-3'-phosphate
  modified_base 6: mod_base = OTHER; note = 2'-deoxy-2'-fluoro-uridine-3'-phosphate
  modified_base 7: mod_base = OTHER; note = 2'-O-methyl-uridine-3'-phosphate
  modified_base 8: mod_base = OTHER; note = 2'-deoxy-2'-fluoro-adenosine-3'-phosphate
  modified_base 9: mod_base = OTHER; note = 2'-deoxy-2'-fluoro-cytidine-3'-phosphate
  modified_base 10: mod_base = OTHER; note = 2'-O-methyl-uridine-3'-phosphate
  modified_base 11: mod_base = OTHER; note = 2'-O-methyl-uridine-3'-phosphate
  modified_base 12: mod_base = OTHER; note = 2'-O-methyl-uridine-3'-phosphate
  modified_base 13: mod_base = OTHER; note = 2'-O-methyl-guanosine-3'-phosphate
  modified_base 14: mod_base = OTHER; note = 2'-deoxy-2'-fluoro-adenosine-3'-phosphate
  modified_base 15: mod_base = OTHER; note = 2'-O-methyl-uridine-3'-phosphate
  modified_base 16: mod_base = OTHER; note = 2'-deoxy-2'-fluoro-adenosine-3'-phosphate
  modified_base 17: mod_base = OTHER; note = 2'-O-methyl-cytidine-3'-phosphate
  modified_base 18: mod_base = OTHER; note = 2'-O-methyl-uridine-3'-phosphate
  modified_base 19: mod_base = OTHER; note = 2'-O-methyl-uridine-3'-phosphorothioate
  modified_base 20: mod_base = OTHER; note = 2'-O-methyl-uridine-3'-phosphorothioate
  modified_base 21: mod_base = OTHER; note = 2'-O-methyl-uridine-3'-phosphate
tgttattactttgatactttt

SEQ ID NO: 2127 - RNA, 21 nt, synthetic construct
  source 1..21: mol_type = other RNA
  modified_base 1: mod_base = OTHER; note = 2'-O-methyl-uridine-3'-phosphorothioate
  modified_base 2: mod_base = OTHER; note = 2'-deoxy-2'-fluoro-uridine-3'-phosphorothioate
  modified_base 3: mod_base = OTHER; note = 2'-O-methyl-guanosine-3'-phosphate
  modified_base 4: mod_base = OTHER; note = 2'-O-methyl-uridine-3'-phosphate
  modified_base 5: mod_base = OTHER; note = 2'-O-methyl-uridine-3'-phosphate
  modified_base 6: mod_base = OTHER; note = 2'-deoxy-2'-fluoro-adenosine-3'-phosphate
  modified_base 7: mod_base = OTHER; note = 2'-O-methyl-uridine-3'-phosphate
  modified_base 8: mod_base = OTHER; note = 2'-deoxy-2'-fluoro-uridine-3'-phosphate
  modified_base 9: mod_base = OTHER; note = 2'-deoxy-2'-fluoro-adenosine-3'-phosphate
  modified_base 10: mod_base = OTHER; note = 2'-O-methyl-cytidine-3'-phosphate
  modified_base 11: mod_base = OTHER; note = 2'-O-methyl-uridine-3'-phosphate
  modified_base 12: mod_base = OTHER; note = 2'-O-methyl-uridine-3'-phosphate
  modified_base 13: mod_base = OTHER; note = 2'-O-methyl-uridine-3'-phosphate
  modified_base 14: mod_base = OTHER; note = 2'-deoxy-2'-fluoro-guanosine-3'-phosphate
  modified_base 15: mod_base = OTHER; note = 2'-O-methyl-adenosine-3'-phosphate
  modified_base 16: mod_base = OTHER; note = 2'-deoxy-2'-fluoro-uridine-3'-phosphate
  modified_base 17: mod_base = OTHER; note = 2'-O-methyl-adenosine-3'-phosphate
  modified_base 18: mod_base = OTHER; note = 2'-O-methyl-cytidine-3'-phosphate
  modified_base 19: mod_base = OTHER; note = 2'-O-methyl-uridine-3'-phosphorothioate
  modified_base 20: mod_base = OTHER; note = 2'-O-methyl-uridine-3'-phosphorothioate
  modified_base 21: mod_base = OTHER; note = 2'-O-methyl-uridine-3'-phosphate
ttgttattactttgatacttt

SEQ ID NO: 2128 - RNA, 21 nt, synthetic construct
  source 1..21: mol_type = other RNA
  modified_base 1: mod_base = OTHER; note = 2'-O-methyl-uridine-3'-phosphorothioate
  modified_base 2: mod_base = OTHER; note = 2'-deoxy-2'-fluoro-cytidine-3'-phosphorothioate
  modified_base 3: mod_base = OTHER; note = 2'-O-methyl-adenosine-3'-phosphate
  modified_base 4: mod_base = OTHER; note = 2'-O-methyl-cytidine-3'-phosphate
  modified_base 5: mod_base = OTHER; note = 2'-O-methyl-uridine-3'-phosphate
  modified_base 6: mod_base = OTHER; note = 2'-deoxy-2'-fluoro-uridine-3'-phosphate
  modified_base 7: mod_base = OTHER; note = 2'-O-methyl-cytidine-3'-phosphate
  modified_base 8: mod_base = OTHER; note = 2'-deoxy-2'-fluoro-adenosine-3'-phosphate
  modified_base 9: mod_base = OTHER; note = 2'-deoxy-2'-fluoro-uridine-3'-phosphate
  modified_base 10: mod_base = OTHER; note = 2'-O-methyl-uridine-3'-phosphate
  modified_base 11: mod_base = OTHER; note = 2'-O-methyl-uridine-3'-phosphate
  modified_base 12: mod_base = OTHER; note = 2'-O-methyl-guanosine-3'-phosphate
  modified_base 13: mod_base = OTHER; note = 2'-O-methyl-uridine-3'-phosphate
  modified_base 14: mod_base = OTHER; note = 2'-deoxy-2'-fluoro-guanosine-3'-phosphate
  modified_base 15: mod_base = OTHER; note = 2'-O-methyl-uridine-3'-phosphate
  modified_base 16: mod_base = OTHER; note = 2'-deoxy-2'-fluoro-uridine-3'-phosphate
  modified_base 17: mod_base = OTHER; note = 2'-O-methyl-adenosine-3'-phosphate
  modified_base 18: mod_base = OTHER; note = 2'-O-methyl-uridine-3'-phosphate
  modified_base 19: mod_base = OTHER; note = 2'-O-methyl-uridine-3'-phosphorothioate
  modified_base 20: mod_base = OTHER; note = 2'-O-methyl-uridine-3'-phosphorothioate
  modified_base 21: mod_base = OTHER; note = 2'-O-methyl-uridine-3'-phosphate
tcacttcatttgtgttatttt

SEQ ID NO: 2129 - RNA, 21 nt, synthetic construct
  source 1..21: mol_type = other RNA
  modified_base 1: mod_base = OTHER; note = 2'-O-methyl-uridine-3'-phosphorothioate
  modified_base 2: mod_base = OTHER; note = 2'-deoxy-2'-fluoro-guanosine-3'-phosphorothioate
  modified_base 3: mod_base = OTHER; note = 2'-O-methyl-adenosine-3'-phosphate
  modified_base 4: mod_base = OTHER; note = 2'-O-methyl-uridine-3'-phosphate
  modified_base 5: mod_base = OTHER; note = 2'-O-methyl-guanosine-3'-phosphate
  modified_base 6: mod_base = OTHER; note = 2'-deoxy-2'-fluoro-uridine-3'-phosphate
  modified_base 7: mod_base = OTHER; note = 2'-O-methyl-guanosine-3'-phosphate
  modified_base 8: mod_base = OTHER; note = 2'-deoxy-2'-fluoro-adenosine-3'-phosphate
  modified_base 9: mod_base = OTHER; note = 2'-deoxy-2'-fluoro-guanosine-3'-phosphate
  modified_base 10: mod_base = OTHER; note = 2'-O-methyl-guanosine-3'-phosphate
  modified_base 11: mod_base = OTHER; note = 2'-O-methyl-adenosine-3'-phosphate
  modified_base 12: mod_base = OTHER; note = 2'-O-methyl-guanosine-3'-phosphate
  modified_base 13: mod_base = OTHER; note = 2'-O-methyl-uridine-3'-phosphate
  modified_base 14: mod_base = OTHER; note = 2'-deoxy-2'-fluoro-cytidine-3'-phosphate
  modified_base 15: mod_base = OTHER; note = 2'-O-methyl-adenosine-3'-phosphate
  modified_base 16: mod_base = OTHER; note = 2'-deoxy-2'-fluoro-guanosine-3'-phosphate
  modified_base 17: mod_base = OTHER; note = 2'-O-methyl-uridine-3'-phosphate
  modified_base 18: mod_base = OTHER; note = 2'-O-methyl-guanosine-3'-phosphate
  modified_base 19: mod_base = OTHER; note = 2'-O-methyl-guanosine-3'-phosphorothioate
  modified_base 20: mod_base = OTHER; note = 2'-O-methyl-uridine-3'-phosphorothioate
  modified_base 21: mod_base = OTHER; note = 2'-O-methyl-uridine-3'-phosphate
tgatgtgaggagtcagtggtt

SEQ ID NO: 2130 - RNA, 21 nt, synthetic construct
  source 1..21: mol_type = other RNA
  modified_base 1: mod_base = OTHER; note = 2'-O-methyl-uridine-3'-phosphorothioate
  modified_base 2: mod_base = OTHER; note = 2'-deoxy-2'-fluoro-uridine-3'-phosphorothioate
  modified_base 3: mod_base = OTHER; note = 2'-O-methyl-adenosine-3'-phosphate
  modified_base 4: mod_base = OTHER; note = 2'-O-methyl-adenosine-3'-phosphate
  modified_base 5: mod_base = OTHER; note = 2'-O-methyl-guanosine-3'-phosphate
  modified_base 6: mod_base = OTHER; note = 2'-deoxy-2'-fluoro-adenosine-3'-phosphate
  modified_base 7: mod_base = OTHER; note = 2'-O-methyl-uridine-3'-phosphate
  modified_base 8: mod_base = OTHER; note = 2'-deoxy-2'-fluoro-adenosine-3'-phosphate
  modified_base 9: mod_base = OTHER; note = 2'-deoxy-2'-fluoro-adenosine-3'-phosphate
  modified_base 10: mod_base = OTHER; note = 2'-O-methyl-cytidine-3'-phosphate
  modified_base 11: mod_base = OTHER; note = 2'-O-methyl-adenosine-3'-phosphate
  modified_base 12: mod_base = OTHER; note = 2'-O-methyl-guanosine-3'-phosphate
  modified_base 13: mod_base = OTHER; note = 2'-O-methyl-adenosine-3'-phosphate
  modified_base 14: mod_base = OTHER; note = 2'-deoxy-2'-fluoro-uridine-3'-phosphate
  modified_base 15: mod_base = OTHER; note = 2'-O-methyl-guanosine-3'-phosphate
  modified_base 16: mod_base = OTHER; note = 2'-deoxy-2'-fluoro-uridine-3'-phosphate
  modified_base 17: mod_base = OTHER; note = 2'-O-methyl-guanosine-3'-phosphate
  modified_base 18: mod_base = OTHER; note = 2'-O-methyl-adenosine-3'-phosphate
  modified_base 19: mod_base = OTHER; note = 2'-O-methyl-guanosine-3'-phosphorothioate
  modified_base 20: mod_base = OTHER; note = 2'-O-methyl-uridine-3'-phosphorothioate
  modified_base 21: mod_base = OTHER; note = 2'-O-methyl-uridine-3'-phosphate
ttaagataacagatgtgagtt

SEQ ID NO: 2131 - RNA, 21 nt, synthetic construct
  source 1..21: mol_type = other RNA
  modified_base 1: mod_base = OTHER; note = 2'-O-methyl-uridine-3'-phosphorothioate
  modified_base 2: mod_base = OTHER; note = 2'-deoxy-2'-fluoro-adenosine-3'-phosphorothioate
  modified_base 3: mod_base = OTHER; note = 2'-O-methyl-uridine-3'-phosphate
  modified_base 4: mod_base = OTHER; note = 2'-O-methyl-adenosine-3'-phosphate
  modified_base 5: mod_base = OTHER; note = 2'-O-methyl-adenosine-3'-phosphate
  modified_base 6: mod_base = OTHER; note = 2'-deoxy-2'-fluoro-guanosine-3'-phosphate
  modified_base 7: mod_base = OTHER; note = 2'-O-methyl-adenosine-3'-phosphate
  modified_base 8: mod_base = OTHER; note = 2'-deoxy-2'-fluoro-uridine-3'-phosphate
  modified_base 9: mod_base = OTHER; note = 2'-deoxy-2'-fluoro-adenosine-3'-phosphate
  modified_base 10: mod_base = OTHER; note = 2'-O-methyl-adenosine-3'-phosphate
  modified_base 11: mod_base = OTHER; note = 2'-O-methyl-cytidine-3'-phosphate
  modified_base 12: mod_base = OTHER; note = 2'-O-methyl-adenosine-3'-phosphate
  modified_base 13: mod_base = OTHER; note = 2'-O-methyl-guanosine-3'-phosphate
  modified_base 14: mod_base = OTHER; note = 2'-deoxy-2'-fluoro-adenosine-3'-phosphate
  modified_base 15: mod_base = OTHER; note = 2'-O-methyl-uridine-3'-phosphate
  modified_base 16: mod_base = OTHER; note = 2'-deoxy-2'-fluoro-guanosine-3'-phosphate
  modified_base 17: mod_base = OTHER; note = 2'-O-methyl-uridine-3'-phosphate
  modified_base 18: mod_base = OTHER; note = 2'-O-methyl-guanosine-3'-phosphate
  modified_base 19: mod_base = OTHER; note = 2'-O-methyl-adenosine-3'-phosphorothioate
  modified_base 20: mod_base = OTHER; note = 2'-O-methyl-uridine-3'-phosphorothioate
  modified_base 21: mod_base = OTHER; note = 2'-O-methyl-uridine-3'-phosphate
tataagataacagatgtgatt

SEQ ID NO: 2132 - RNA, 21 nt, synthetic construct
  source 1..21: mol_type = other RNA
  modified_base 1: mod_base = OTHER; note = 2'-O-methyl-uridine-3'-phosphorothioate
  modified_base 2: mod_base = OTHER; note = 2'-deoxy-2'-fluoro-adenosine-3'-phosphorothioate
  modified_base 3: mod_base = OTHER; note = 2'-O-methyl-adenosine-3'-phosphate
  modified_base 4: mod_base = OTHER; note = 2'-O-methyl-uridine-3'-phosphate
  modified_base 5: mod_base = OTHER; note = 2'-O-methyl-adenosine-3'-phosphate
  modified_base 6: mod_base = OTHER; note = 2'-deoxy-2'-fluoro-adenosine-3'-phosphate
  modified_base 7: mod_base = OTHER; note = 2'-O-methyl-guanosine-3'-phosphate
  modified_base 8: mod_base = OTHER; note = 2'-deoxy-2'-fluoro-adenosine-3'-phosphate
  modified_base 9: mod_base = OTHER; note = 2'-deoxy-2'-fluoro-uridine-3'-phosphate
  modified_base 10: mod_base = OTHER; note = 2'-O-methyl-adenosine-3'-phosphate
  modified_base 11: mod_base = OTHER; note = 2'-O-methyl-adenosine-3'-phosphate
  modified_base 12: mod_base = OTHER; note = 2'-O-methyl-cytidine-3'-phosphate
  modified_base 13: mod_base = OTHER; note = 2'-O-methyl-adenosine-3'-phosphate
  modified_base 14: mod_base = OTHER; note = 2'-deoxy-2'-fluoro-guanosine-3'-phosphate
  modified_base 15: mod_base = OTHER; note = 2'-O-methyl-adenosine-3'-phosphate
  modified_base 16: mod_base = OTHER; note = 2'-deoxy-2'-fluoro-uridine-3'-phosphate
  modified_base 17: mod_base = OTHER; note = 2'-O-methyl-guanosine-3'-phosphate
  modified_base 18: mod_base = OTHER; note = 2'-O-methyl-uridine-3'-phosphate
  modified_base 19: mod_base = OTHER; note = 2'-O-methyl-guanosine-3'-phosphorothioate
  modified_base 20: mod_base = OTHER; note = 2'-O-methyl-uridine-3'-phosphorothioate
  modified_base 21: mod_base = OTHER; note = 2'-O-methyl-uridine-3'-phosphate
taataagataacagatgtgtt

SEQ ID NO: 2133 - RNA, 21 nt, synthetic construct
  source 1..21: mol_type = other RNA
  modified_base 1: mod_base = OTHER; note = 2'-O-methyl-uridine-3'-phosphorothioate
  modified_base 2: mod_base = OTHER; note = 2'-deoxy-2'-fluoro-guanosine-3'-phosphorothioate
  modified_base 3: mod_base = OTHER; note = 2'-O-methyl-uridine-3'-phosphate
  modified_base 4: mod_base = OTHER; note = 2'-O-methyl-uridine-3'-phosphate
  modified_base 5: mod_base = OTHER; note = 2'-O-methyl-adenosine-3'-phosphate
  modified_base 6: mod_base = OTHER; note = 2'-deoxy-2'-fluoro-cytidine-3'-phosphate
  modified_base 7: mod_base = OTHER; note = 2'-O-methyl-uridine-3'-phosphate
  modified_base 8: mod_base = OTHER; note = 2'-deoxy-2'-fluoro-adenosine-3'-phosphate
  modified_base 9: mod_base = OTHER; note = 2'-deoxy-2'-fluoro-cytidine-3'-phosphate
  modified_base 10: mod_base = OTHER; note = 2'-O-methyl-adenosine-3'-phosphate
  modified_base 11: mod_base = OTHER; note = 2'-O-methyl-adenosine-3'-phosphate
  modified_base 12: mod_base = OTHER; note = 2'-O-methyl-adenosine-3'-phosphate
  modified_base 13: mod_base = OTHER; note = 2'-O-methyl-uridine-3'-phosphate
  modified_base 14: mod_base = OTHER; note = 2'-deoxy-2'-fluoro-adenosine-3'-phosphate
  modified_base 15: mod_base = OTHER; note = 2'-O-methyl-guanosine-3'-phosphate
  modified_base 16: mod_base = OTHER; note = 2'-deoxy-2'-fluoro-uridine-3'-phosphate
  modified_base 17: mod_base = OTHER; note = 2'-O-methyl-uridine-3'-phosphate
  modified_base 18: mod_base = OTHER; note = 2'-O-methyl-cytidine-3'-phosphate
  modified_base 19: mod_base = OTHER; note = 2'-O-methyl-uridine-3'-phosphorothioate
  modified_base 20: mod_base = OTHER; note = 2'-O-methyl-uridine-3'-phosphorothioate
  modified_base 21: mod_base = OTHER; note = 2'-O-methyl-uridine-3'-phosphate
tgttactacaaatagttcttt

SEQ ID NO: 2134 - RNA, 21 nt, synthetic construct
  source 1..21: mol_type = other RNA
  modified_base 1: mod_base = OTHER; note = 2'-O-methyl-uridine-3'-phosphorothioate
  modified_base 2: mod_base = OTHER; note = 2'-deoxy-2'-fluoro-adenosine-3'-phosphorothioate
  modified_base 3: mod_base = OTHER; note = 2'-O-methyl-guanosine-3'-phosphate
  modified_base 4: mod_base = OTHER; note = 2'-O-methyl-uridine-3'-phosphate
  modified_base 5: mod_base = OTHER; note = 2'-O-methyl-uridine-3'-phosphate
  modified_base 6: mod_base = OTHER; note = 2'-deoxy-2'-fluoro-adenosine-3'-phosphate
  modified_base 7: mod_base = OTHER; note = 2'-O-methyl-cytidine-3'-phosphate
  modified_base 8: mod_base = OTHER; note = 2'-deoxy-2'-fluoro-uridine-3'-phosphate
  modified_base 9: mod_base = OTHER; note = 2'-deoxy-2'-fluoro-adenosine-3'-phosphate
  modified_base 10: mod_base = OTHER; note = 2'-O-methyl-cytidine-3'-phosphate
  modified_base 11: mod_base = OTHER; note = 2'-O-methyl-adenosine-3'-phosphate
  modified_base 12: mod_base = OTHER; note = 2'-O-methyl-adenosine-3'-phosphate
  modified_base 13: mod_base = OTHER; note = 2'-O-methyl-adenosine-3'-phosphate
  modified_base 14: mod_base = OTHER; note = 2'-deoxy-2'-fluoro-uridine-3'-phosphate
  modified_base 15: mod_base = OTHER; note = 2'-O-methyl-adenosine-3'-phosphate
  modified_base 16: mod_base = OTHER; note = 2'-deoxy-2'-fluoro-guanosine-3'-phosphate
  modified_base 17: mod_base = OTHER; note = 2'-O-methyl-uridine-3'-phosphate
  modified_base 18: mod_base = OTHER; note = 2'-O-methyl-uridine-3'-phosphate
  modified_base 19: mod_base = OTHER; note = 2'-O-methyl-cytidine-3'-phosphorothioate
  modified_base 20: mod_base = OTHER; note = 2'-O-methyl-uridine-3'-phosphorothioate
  modified_base 21: mod_base = OTHER; note = 2'-O-methyl-uridine-3'-phosphate
tagttactacaaatagttctt

SEQ ID NO: 2135 - RNA, 21 nt, synthetic construct
  source 1..21: mol_type = other RNA
  modified_base 1: mod_base = OTHER; note = 2'-O-methyl-uridine-3'-phosphorothioate
  modified_base 2: mod_base = OTHER; note = 2'-deoxy-2'-fluoro-guanosine-3'-phosphorothioate
  modified_base 3: mod_base = OTHER; note = 2'-O-methyl-adenosine-3'-phosphate
  modified_base 4: mod_base = OTHER; note = 2'-O-methyl-uridine-3'-phosphate
  modified_base 5: mod_base = OTHER; note = 2'-O-methyl-adenosine-3'-phosphate
  modified_base 6: mod_base = OTHER; note = 2'-deoxy-2'-fluoro-guanosine-3'-phosphate
  modified_base 7: mod_base = OTHER; note = 2'-O-methyl-uridine-3'-phosphate
  modified_base 8: mod_base = OTHER; note = 2'-deoxy-2'-fluoro-uridine-3'-phosphate
  modified_base 9: mod_base = OTHER; note = 2'-deoxy-2'-fluoro-adenosine-3'-phosphate
  modified_base 10: mod_base = OTHER; note = 2'-O-methyl-cytidine-3'-phosphate
  modified_base 11: mod_base = OTHER; note = 2'-O-methyl-uridine-3'-phosphate
  modified_base 12: mod_base = OTHER; note = 2'-O-methyl-adenosine-3'-phosphate
  modified_base 13: mod_base = OTHER; note = 2'-O-methyl-cytidine-3'-phosphate
  modified_base 14: mod_base = OTHER; note = 2'-deoxy-2'-fluoro-adenosine-3'-phosphate
  modified_base 15: mod_base = OTHER; note = 2'-O-methyl-adenosine-3'-phosphate
  modified_base 16: mod_base = OTHER; note = 2'-deoxy-2'-fluoro-adenosine-3'-phosphate
  modified_base 17: mod_base = OTHER; note = 2'-O-methyl-uridine-3'-phosphate
  modified_base 18: mod_base = OTHER; note = 2'-O-methyl-adenosine-3'-phosphate
  modified_base 19: mod_base = OTHER; note = 2'-O-methyl-guanosine-3'-phosphorothioate
  modified_base 20: mod_base = OTHER; note = 2'-O-methyl-uridine-3'-phosphorothioate
  modified_base 21: mod_base = OTHER; note = 2'-O-methyl-uridine-3'-phosphate
tgatagttactacaaatagtt

SEQ ID NO: 2136 - RNA, 21 nt, synthetic construct
  source 1..21: mol_type = other RNA
  modified_base 1: mod_base = OTHER; note = 2'-O-methyl-uridine-3'-phosphorothioate
  modified_base 2: mod_base = OTHER; note = 2'-deoxy-2'-fluoro-uridine-3'-phosphorothioate
  modified_base 3: mod_base = OTHER; note = 2'-O-methyl-guanosine-3'-phosphate
  modified_base 4: mod_base = OTHER; note = 2'-O-methyl-adenosine-3'-phosphate
  modified_base 5: mod_base = OTHER; note = 2'-O-methyl-uridine-3'-phosphate
  modified_base 6: mod_base = OTHER; note = 2'-deoxy-2'-fluoro-adenosine-3'-phosphate
  modified_base 7: mod_base = OTHER; note = 2'-O-methyl-guanosine-3'-phosphate
  modified_base 8: mod_base = OTHER; note = 2'-deoxy-2'-fluoro-uridine-3'-phosphate
  modified_base 9: mod_base = OTHER; note = 2'-deoxy-2'-fluoro-uridine-3'-phosphate
  modified_base 10: mod_base = OTHER; note = 2'-O-methyl-adenosine-3'-phosphate
  modified_base 11: mod_base = OTHER; note = 2'-O-methyl-cytidine-3'-phosphate
  modified_base 12: mod_base = OTHER; note = 2'-O-methyl-uridine-3'-phosphate
  modified_base 13: mod_base = OTHER; note = 2'-O-methyl-adenosine-3'-phosphate
  modified_base 14: mod_base = OTHER; note = 2'-deoxy-2'-fluoro-cytidine-3'-phosphate
  modified_base 15: mod_base = OTHER; note = 2'-O-methyl-adenosine-3'-phosphate
  modified_base 16: mod_base = OTHER; note = 2'-deoxy-2'-fluoro-adenosine-3'-phosphate
  modified_base 17: mod_base = OTHER; note = 2'-O-methyl-adenosine-3'-phosphate
  modified_base 18: mod_base = OTHER; note = 2'-O-methyl-uridine-3'-phosphate
  modified_base 19: mod_base = OTHER; note = 2'-O-methyl-adenosine-3'-phosphorothioate
  modified_base 20: mod_base = OTHER; note = 2'-O-methyl-uridine-3'-phosphorothioate
  modified_base 21: mod_base = OTHER; note = 2'-O-methyl-uridine-3'-phosphate
ttgatagttactacaaatatt

SEQ ID NO: 2137 - RNA, 21 nt, synthetic construct
  source 1..21: mol_type = other RNA
  modified_base 1: mod_base = OTHER; note = 2'-O-methyl-uridine-3'-phosphorothioate
  modified_base 2: mod_base = OTHER; note = 2'-deoxy-2'-fluoro-cytidine-3'-phosphorothioate
  modified_base 3: mod_base = OTHER; note = 2'-O-methyl-uridine-3'-phosphate
  modified_base 4: mod_base = OTHER; note = 2'-O-methyl-guanosine-3'-phosphate
  modified_base 5: mod_base = OTHER; note = 2'-O-methyl-adenosine-3'-phosphate
  modified_base 6: mod_base = OTHER; note = 2'-deoxy-2'-fluoro-uridine-3'-phosphate
  modified_base 7: mod_base = OTHER; note = 2'-O-methyl-adenosine-3'-phosphate
  modified_base 8: mod_base = OTHER; note = 2'-deoxy-2'-fluoro-guanosine-3'-phosphate
  modified_base 9: mod_base = OTHER; note = 2'-deoxy-2'-fluoro-uridine-3'-phosphate
  modified_base 10: mod_base = OTHER; note = 2'-O-methyl-uridine-3'-phosphate
  modified_base 11: mod_base = OTHER; note = 2'-O-methyl-adenosine-3'-phosphate
  modified_base 12: mod_base = OTHER; note = 2'-O-methyl-cytidine-3'-phosphate
  modified_base 13: mod_base = OTHER; note = 2'-O-methyl-uridine-3'-phosphate
  modified_base 14: mod_base = OTHER; note = 2'-deoxy-2'-fluoro-adenosine-3'-phosphate
  modified_base 15: mod_base = OTHER; note = 2'-O-methyl-cytidine-3'-phosphate
  modified_base 16: mod_base = OTHER; note = 2'-deoxy-2'-fluoro-adenosine-3'-phosphate
  modified_base 17: mod_base = OTHER; note = 2'-O-methyl-adenosine-3'-phosphate
  modified_base 18: mod_base = OTHER; note = 2'-O-methyl-adenosine-3'-phosphate
  modified_base 19: mod_base = OTHER; note = 2'-O-methyl-uridine-3'-phosphorothioate
  modified_base 20: mod_base = OTHER; note = 2'-O-methyl-uridine-3'-phosphorothioate
  modified_base 21: mod_base = OTHER; note = 2'-O-methyl-uridine-3'-phosphate
tctgatagttactacaaattt

SEQ ID NO: 2138 - RNA, 21 nt, synthetic construct
  source 1..21: mol_type = other RNA
  modified_base 1: mod_base = OTHER; note = 2'-O-methyl-uridine-3'-phosphorothioate
  modified_base 2: mod_base = OTHER; note = 2'-deoxy-2'-fluoro-guanosine-3'-phosphorothioate
  modified_base 3: mod_base = OTHER; note = 2'-O-methyl-adenosine-3'-phosphate
  modified_base 4: mod_base = OTHER; note = 2'-O-methyl-uridine-3'-phosphate
  modified_base 5: mod_base = OTHER; note = 2'-O-methyl-uridine-3'-phosphate
  modified_base 6: mod_base = OTHER; note = 2'-deoxy-2'-fluoro-cytidine-3'-phosphate
  modified_base 7: mod_base = OTHER; note = 2'-O-methyl-uridine-3'-phosphate
  modified_base 8: mod_base = OTHER; note = 2'-deoxy-2'-fluoro-guanosine-3'-phosphate
  modified_base 9: mod_base = OTHER; note = 2'-deoxy-2'-fluoro-adenosine-3'-phosphate
  modified_base 10: mod_base = OTHER; note = 2'-O-methyl-uridine-3'-phosphate
  modified_base 11: mod_base = OTHER; note = 2'-O-methyl-adenosine-3'-phosphate
  modified_base 12: mod_base = OTHER; note = 2'-O-methyl-guanosine-3'-phosphate
  modified_base 13: mod_base = OTHER; note = 2'-O-methyl-uridine-3'-phosphate
  modified_base 14: mod_base = OTHER; note = 2'-deoxy-2'-fluoro-uridine-3'-phosphate
  modified_base 15: mod_base = OTHER; note = 2'-O-methyl-adenosine-3'-phosphate
  modified_base 16: mod_base = OTHER; note = 2'-deoxy-2'-fluoro-cytidine-3'-phosphate
  modified_base 17: mod_base = OTHER; note = 2'-O-methyl-uridine-3'-phosphate
  modified_base 18: mod_base = OTHER; note = 2'-O-methyl-adenosine-3'-phosphate
  modified_base 19: mod_base = OTHER; note = 2'-O-methyl-cytidine-3'-phosphorothioate
  modified_base 20: mod_base = OTHER; note = 2'-O-methyl-uridine-3'-phosphorothioate
  modified_base 21: mod_base = OTHER; note = 2'-O-methyl-uridine-3'-phosphate
tgattctgatagttactactt

SEQ ID NO: 2139 - RNA, 21 nt, synthetic construct
  source 1..21: mol_type = other RNA
  modified_base 1: mod_base = OTHER; note = 2'-O-methyl-uridine-3'-phosphorothioate
  modified_base 2: mod_base = OTHER; note = 2'-deoxy-2'-fluoro-adenosine-3'-phosphorothioate
  modified_base 3: mod_base = OTHER; note = 2'-O-methyl-guanosine-3'-phosphate
  modified_base 4: mod_base = OTHER; note = 2'-O-methyl-adenosine-3'-phosphate
  modified_base 5: mod_base = OTHER; note = 2'-O-methyl-uridine-3'-phosphate
  modified_base 6: mod_base = OTHER; note = 2'-deoxy-2'-fluoro-uridine-3'-phosphate
  modified_base 7: mod_base = OTHER; note = 2'-O-methyl-cytidine-3'-phosphate
  modified_base 8: mod_base = OTHER; note = 2'-deoxy-2'-fluoro-uridine-3'-phosphate
  modified_base 9: mod_base = OTHER; note = 2'-deoxy-2'-fluoro-guanosine-3'-phosphate
  modified_base 10: mod_base = OTHER; note = 2'-O-methyl-adenosine-3'-phosphate
  modified_base 11: mod_base = OTHER; note = 2'-O-methyl-uridine-3'-phosphate
  modified_base 12: mod_base = OTHER; note = 2'-O-methyl-adenosine-3'-phosphate
  modified_base 13: mod_base = OTHER; note = 2'-O-methyl-guanosine-3'-phosphate
  modified_base 14: mod_base = OTHER; note = 2'-deoxy-2'-fluoro-uridine-3'-phosphate
  modified_base 15: mod_base = OTHER; note = 2'-O-methyl-uridine-3'-phosphate
  modified_base 16: mod_base = OTHER; note = 2'-deoxy-2'-fluoro-adenosine-3'-phosphate
  modified_base 17: mod_base = OTHER; note = 2'-O-methyl-cytidine-3'-phosphate
  modified_base 18: mod_base = OTHER; note = 2'-O-methyl-uridine-3'-phosphate
  modified_base 19: mod_base = OTHER; note = 2'-O-methyl-adenosine-3'-phosphorothioate
  modified_base 20: mod_base = OTHER; note = 2'-O-methyl-uridine-3'-phosphorothioate
  modified_base 21: mod_base = OTHER; note = 2'-O-methyl-uridine-3'-phosphate
tagattctgatagttactatt

SEQ ID NO: 2140 - RNA, 21 nt, synthetic construct
  source 1..21: mol_type = other RNA
  modified_base 1: mod_base = OTHER; note = 2'-O-methyl-uridine-3'-phosphorothioate
  modified_base 2: mod_base = OTHER; note = 2'-deoxy-2'-fluoro-uridine-3'-phosphorothioate
  modified_base 3: mod_base = OTHER; note = 2'-O-methyl-guanosine-3'-phosphate
  modified_base 4: mod_base = OTHER; note = 2'-O-methyl-uridine-3'-phosphate
  modified_base 5: mod_base = OTHER; note = 2'-O-methyl-adenosine-3'-phosphate
  modified_base 6: mod_base = OTHER; note = 2'-deoxy-2'-fluoro-guanosine-3'-phosphate
  modified_base 7: mod_base = OTHER; note = 2'-O-methyl-adenosine-3'-phosphate
  modified_base 8: mod_base = OTHER; note = 2'-deoxy-2'-fluoro-uridine-3'-phosphate
  modified_base 9: mod_base = OTHER; note = 2'-deoxy-2'-fluoro-uridine-3'-phosphate
  modified_base 10: mod_base = OTHER; note = 2'-O-methyl-cytidine-3'-phosphate
  modified_base 11: mod_base = OTHER; note = 2'-O-methyl-uridine-3'-phosphate
  modified_base 12: mod_base = OTHER; note = 2'-O-methyl-guanosine-3'-phosphate
  modified_base 13: mod_base = OTHER; note = 2'-O-methyl-adenosine-3'-phosphate
  modified_base 14: mod_base = OTHER; note = 2'-deoxy-2'-fluoro-uridine-3'-phosphate
  modified_base 15: mod_base = OTHER; note = 2'-O-methyl-adenosine-3'-phosphate
  modified_base 16: mod_base = OTHER; note = 2'-deoxy-2'-fluoro-guanosine-3'-phosphate
  modified_base 17: mod_base = OTHER; note = 2'-O-methyl-uridine-3'-phosphate
  modified_base 18: mod_base = OTHER; note = 2'-O-methyl-uridine-3'-phosphate
  modified_base 19: mod_base = OTHER; note = 2'-O-methyl-adenosine-3'-phosphorothioate
  modified_base 20: mod_base = OTHER; note = 2'-O-methyl-uridine-3'-phosphorothioate
  modified_base 21: mod_base = OTHER; note = 2'-O-methyl-uridine-3'-phosphate
ttgtagattctgatagttatt

SEQ ID NO: 2141 - RNA, 21 nt, synthetic construct
  source 1..21: mol_type = other RNA
  modified_base 1: mod_base = OTHER; note = 2'-O-methyl-uridine-3'-phosphorothioate
  modified_base 2: mod_base = OTHER; note = 2'-deoxy-2'-fluoro-guanosine-3'-phosphorothioate
  modified_base 3: mod_base = OTHER; note = 2'-O-methyl-adenosine-3'-phosphate
  modified_base 4: mod_base = OTHER; note = 2'-O-methyl-adenosine-3'-phosphate
  modified_base 5: mod_base = OTHER; note = 2'-O-methyl-uridine-3'-phosphate
  modified_base 6: mod_base = OTHER; note = 2'-deoxy-2'-fluoro-guanosine-3'-phosphate
  modified_base 7: mod_base = OTHER; note = 2'-O-methyl-uridine-3'-phosphate
  modified_base 8: mod_base = OTHER; note = 2'-deoxy-2'-fluoro-adenosine-3'-phosphate
  modified_base 9: mod_base = OTHER; note = 2'-deoxy-2'-fluoro-guanosine-3'-phosphate
  modified_base 10: mod_base = OTHER; note = 2'-O-methyl-adenosine-3'-phosphate
  modified_base 11: mod_base = OTHER; note = 2'-O-methyl-uridine-3'-phosphate
  modified_base 12: mod_base = OTHER; note = 2'-O-methyl-uridine-3'-phosphate
  modified_base 13: mod_base = OTHER; note = 2'-O-methyl-cytidine-3'-phosphate
  modified_base 14: mod_base = OTHER; note = 2'-deoxy-2'-fluoro-uridine-3'-phosphate
  modified_base 15: mod_base = OTHER; note = 2'-O-methyl-guanosine-3'-phosphate
  modified_base 16: mod_base = OTHER; note = 2'-deoxy-2'-fluoro-adenosine-3'-phosphate
  modified_base 17: mod_base = OTHER; note = 2'-O-methyl-uridine-3'-phosphate
  modified_base 18: mod_base = OTHER; note = 2'-O-methyl-adenosine-3'-phosphate
  modified_base 19: mod_base = OTHER; note = 2'-O-methyl-guanosine-3'-phosphorothioate
  modified_base 20: mod_base = OTHER; note = 2'-O-methyl-uridine-3'-phosphorothioate
  modified_base 21: mod_base = OTHER; note = 2'-O-methyl-uridine-3'-phosphate
tgaatgtagattctgatagtt

SEQ ID NO: 2142 - RNA, 21 nt, synthetic construct
  source 1..21: mol_type = other RNA
  modified_base 1: mod_base = OTHER; note = 2'-O-methyl-uridine-3'-phosphorothioate
  modified_base 2: mod_base = OTHER; note = 2'-deoxy-2'-fluoro-uridine-3'-phosphorothioate
  modified_base 3: mod_base = OTHER; note = 2'-O-methyl-guanosine-3'-phosphate
  modified_base 4: mod_base = OTHER; note = 2'-O-methyl-adenosine-3'-phosphate
  modified_base 5: mod_base = OTHER; note = 2'-O-methyl-uridine-3'-phosphate
  modified_base 6: mod_base = OTHER; note = 2'-deoxy-2'-fluoro-uridine-3'-phosphate
  modified_base 7: mod_base = OTHER; note = 2'-O-methyl-cytidine-3'-phosphate
  modified_base 8: mod_base = OTHER; note = 2'-deoxy-2'-fluoro-uridine-3'-phosphate
  modified_base 9: mod_base = OTHER; note = 2'-deoxy-2'-fluoro-cytidine-3'-phosphate
  modified_base 10: mod_base = OTHER; note = 2'-O-methyl-adenosine-3'-phosphate
  modified_base 11: mod_base = OTHER; note = 2'-O-methyl-uridine-3'-phosphate
  modified_base 12: mod_base = OTHER; note = 2'-O-methyl-cytidine-3'-phosphate
  modified_base 13: mod_base = OTHER; note = 2'-O-methyl-adenosine-3'-phosphate
  modified_base 14: mod_base = OTHER; note = 2'-deoxy-2'-fluoro-adenosine-3'-phosphate
  modified_base 15: mod_base = OTHER; note = 2'-O-methyl-cytidine-3'-phosphate
  modified_base 16: mod_base = OTHER; note = 2'-deoxy-2'-fluoro-uridine-3'-phosphate
  modified_base 17: mod_base = OTHER; note = 2'-O-methyl-uridine-3'-phosphate
  modified_base 18: mod_base = OTHER; note = 2'-O-methyl-uridine-3'-phosphate
  modified_base 19: mod_base = OTHER; note = 2'-O-methyl-adenosine-3'-phosphorothioate
  modified_base 20: mod_base = OTHER; note = 2'-O-methyl-uridine-3'-phosphorothioate
  modified_base 21: mod_base = OTHER; note = 2'-O-methyl-uridine-3'-phosphate
ttgattctcatcaactttatt

SEQ ID NO: 2143 - RNA, 21 nt, synthetic construct
  source 1..21: mol_type = other RNA
  modified_base 1: mod_base = OTHER; note = 2'-O-methyl-uridine-3'-phosphorothioate
  modified_base 2: mod_base = OTHER; note = 2'-deoxy-2'-fluoro-uridine-3'-phosphorothioate
  modified_base 3: mod_base = OTHER; note = 2'-O-methyl-uridine-3'-phosphate
  modified_base 4: mod_base = OTHER; note = 2'-O-methyl-guanosine-3'-phosphate
  modified_base 5: mod_base = OTHER; note = 2'-O-methyl-adenosine-3'-phosphate
  modified_base 6: mod_base = OTHER; note = 2'-deoxy-2'-fluoro-uridine-3'-phosphate
  modified_base 7: mod_base = OTHER; note = 2'-O-methyl-uridine-3'-phosphate
  modified_base 8: mod_base = OTHER; note = 2'-deoxy-2'-fluoro-cytidine-3'-phosphate
  modified_base 9: mod_base = OTHER; note = 2'-deoxy-2'-fluoro-uridine-3'-phosphate
  modified_base 10: mod_base = OTHER; note = 2'-O-methyl-cytidine-3'-phosphate
  modified_base 11: mod_base = OTHER; note = 2'-O-methyl-adenosine-3'-phosphate
  modified_base 12: mod_base = OTHER; note = 2'-O-methyl-uridine-3'-phosphate
  modified_base 13: mod_base = OTHER; note = 2'-O-methyl-cytidine-3'-phosphate
  modified_base 14: mod_base = OTHER; note = 2'-deoxy-2'-fluoro-adenosine-3'-phosphate
  modified_base 15: mod_base = OTHER; note = 2'-O-methyl-adenosine-3'-phosphate
  modified_base 16: mod_base = OTHER; note = 2'-deoxy-2'-fluoro-cytidine-3'-phosphate
  modified_base 17: mod_base = OTHER; note = 2'-O-methyl-uridine-3'-phosphate
  modified_base 18: mod_base = OTHER; note = 2'-O-methyl-uridine-3'-phosphate
  modified_base 19: mod_base = OTHER; note = 2'-O-methyl-uridine-3'-phosphorothioate
  modified_base 20: mod_base = OTHER; note = 2'-O-methyl-uridine-3'-phosphorothioate
  modified_base 21: mod_base = OTHER; note = 2'-O-methyl-uridine-3'-phosphate
tttgattctcatcaacttttt

SEQ ID NO: 2144 - RNA, 21 nt, synthetic construct
  source 1..21: mol_type = other RNA
  modified_base 1: mod_base = OTHER; note = 2'-O-methyl-uridine-3'-phosphorothioate
  modified_base 2: mod_base = OTHER; note = 2'-deoxy-2'-fluoro-cytidine-3'-phosphorothioate
  modified_base 3: mod_base = OTHER; note = 2'-O-methyl-uridine-3'-phosphate
  modified_base 4: mod_base = OTHER; note = 2'-O-methyl-uridine-3'-phosphate
  modified_base 5: mod_base = OTHER; note = 2'-O-methyl-guanosine-3'-phosphate
  modified_base 6: mod_base = OTHER; note = 2'-deoxy-2'-fluoro-adenosine-3'-phosphate
  modified_base 7: mod_base = OTHER; note = 2'-O-methyl-uridine-3'-phosphate
  modified_base 8: mod_base = OTHER; note = 2'-deoxy-2'-fluoro-uridine-3'-phosphate
  modified_base 9: mod_base = OTHER; note = 2'-deoxy-2'-fluoro-cytidine-3'-phosphate
  modified_base 10: mod_base = OTHER; note = 2'-O-methyl-uridine-3'-phosphate
  modified_base 11: mod_base = OTHER; note = 2'-O-methyl-cytidine-3'-phosphate
  modified_base 12: mod_base = OTHER; note = 2'-O-methyl-adenosine-3'-phosphate
  modified_base 13: mod_base = OTHER; note = 2'-O-methyl-uridine-3'-phosphate
  modified_base 14: mod_base = OTHER; note = 2'-deoxy-2'-fluoro-cytidine-3'-phosphate
  modified_base 15: mod_base = OTHER; note = 2'-O-methyl-adenosine-3'-phosphate
  modified_base 16: mod_base = OTHER; note = 2'-deoxy-2'-fluoro-adenosine-3'-phosphate
  modified_base 17: mod_base = OTHER; note = 2'-O-methyl-cytidine-3'-phosphate
  modified_base 18: mod_base = OTHER; note = 2'-O-methyl-uridine-3'-phosphate
  modified_base 19: mod_base = OTHER; note = 2'-O-methyl-uridine-3'-phosphorothioate
  modified_base 20: mod_base = OTHER; note = 2'-O-methyl-uridine-3'-phosphorothioate
  modified_base 21: mod_base = OTHER; note = 2'-O-methyl-uridine-3'-phosphate
tcttgattctcatcaactttt

SEQ ID NO: 2145 - RNA, 21 nt, synthetic construct
  source 1..21: mol_type = other RNA
  modified_base 1: mod_base = OTHER; note = 2'-O-methyl-uridine-3'-phosphorothioate
  modified_base 2: mod_base = OTHER; note = 2'-deoxy-2'-fluoro-adenosine-3'-phosphorothioate
  modified_base 3: mod_base = OTHER; note = 2'-O-methyl-cytidine-3'-phosphate
  modified_base 4: mod_base = OTHER; note = 2'-O-methyl-uridine-3'-phosphate
  modified_base 5: mod_base = OTHER; note = 2'-O-methyl-uridine-3'-phosphate
  modified_base 6: mod_base = OTHER; note = 2'-deoxy-2'-fluoro-guanosine-3'-phosphate
  modified_base 7: mod_base = OTHER; note = 2'-O-methyl-adenosine-3'-phosphate
  modified_base 8: mod_base = OTHER; note = 2'-deoxy-2'-fluoro-uridine-3'-phosphate
  modified_base 9: mod_base = OTHER; note = 2'-deoxy-2'-fluoro-uridine-3'-phosphate
  modified_base 10: mod_base = OTHER; note = 2'-O-methyl-cytidine-3'-phosphate
  modified_base 11: mod_base = OTHER; note = 2'-O-methyl-uridine-3'-phosphate
  modified_base 12: mod_base = OTHER; note = 2'-O-methyl-cytidine-3'-phosphate
  modified_base 13: mod_base = OTHER; note = 2'-O-methyl-adenosine-3'-phosphate
  modified_base 14: mod_base = OTHER; note = 2'-deoxy-2'-fluoro-uridine-3'-phosphate
  modified_base 15: mod_base = OTHER; note = 2'-O-methyl-cytidine-3'-phosphate
  modified_base 16: mod_base = OTHER; note = 2'-deoxy-2'-fluoro-adenosine-3'-phosphate
  modified_base 17: mod_base = OTHER; note = 2'-O-methyl-adenosine-3'-phosphate
  modified_base 18: mod_base = OTHER; note = 2'-O-methyl-cytidine-3'-phosphate
  modified_base 19: mod_base = OTHER; note = 2'-O-methyl-uridine-3'-phosphorothioate
  modified_base 20: mod_base = OTHER; note = 2'-O-methyl-uridine-3'-phosphorothioate
  modified_base 21: mod_base = OTHER; note = 2'-O-methyl-uridine-3'-phosphate
tacttgattctcatcaacttt

SEQ ID NO: 2146 - RNA, 21 nt, synthetic construct
  source 1..21: mol_type = other RNA
  modified_base 1: mod_base = OTHER; note = 2'-O-methyl-uridine-3'-phosphorothioate
  modified_base 2: mod_base = OTHER; note = 2'-deoxy-2'-fluoro-uridine-3'-phosphorothioate
  modified_base 3: mod_base = OTHER; note = 2'-O-methyl-adenosine-3'-phosphate
  modified_base 4: mod_base = OTHER; note = 2'-O-methyl-adenosine-3'-phosphate
  modified_base 5: mod_base = OTHER; note = 2'-O-methyl-guanosine-3'-phosphate
  modified_base 6: mod_base = OTHER; note = 2'-deoxy-2'-fluoro-adenosine-3'-phosphate
  modified_base 7: mod_base = OTHER; note = 2'-O-methyl-guanosine-3'-phosphate
  modified_base 8: mod_base = OTHER; note = 2'-deoxy-2'-fluoro-uridine-3'-phosphate
  modified_base 9: mod_base = OTHER; note = 2'-deoxy-2'-fluoro-adenosine-3'-phosphate
  modified_base 10: mod_base = OTHER; note = 2'-O-methyl-uridine-3'-phosphate
  modified_base 11: mod_base = OTHER; note = 2'-O-methyl-guanosine-3'-phosphate
  modified_base 12: mod_base = OTHER; note = 2'-O-methyl-guanosine-3'-phosphate
  modified_base 13: mod_base = OTHER; note = 2'-O-methyl-cytidine-3'-phosphate
  modified_base 14: mod_base = OTHER; note = 2'-deoxy-2'-fluoro-cytidine-3'-phosphate
  modified_base 15: mod_base = OTHER; note = 2'-O-methyl-uridine-3'-phosphate
  modified_base 16: mod_base = OTHER; note = 2'-deoxy-2'-fluoro-uridine-3'-phosphate
  modified_base 17: mod_base = OTHER; note = 2'-O-methyl-adenosine-3'-phosphate
  modified_base 18: mod_base = OTHER; note = 2'-O-methyl-cytidine-3'-phosphate
  modified_base 19: mod_base = OTHER; note = 2'-O-methyl-uridine-3'-phosphorothioate
  modified_base 20: mod_base = OTHER; note = 2'-O-methyl-uridine-3'-phosphorothioate
  modified_base 21: mod_base = OTHER; note = 2'-O-methyl-uridine-3'-phosphate
ttaagagtatggccttacttt

SEQ ID NO: 2147 - RNA, 21 nt, synthetic construct
  source 1..21: mol_type = other RNA
  modified_base 1: mod_base = OTHER; note = 2'-O-methyl-uridine-3'-phosphorothioate
  modified_base 2: mod_base = OTHER; note = 2'-deoxy-2'-fluoro-guanosine-3'-phosphorothioate
  modified_base 3: mod_base = OTHER; note = 2'-O-methyl-uridine-3'-phosphate
  modified_base 4: mod_base = OTHER; note = 2'-O-methyl-adenosine-3'-phosphate
  modified_base 5: mod_base = OTHER; note = 2'-O-methyl-adenosine-3'-phosphate
  modified_base 6: mod_base = OTHER; note = 2'-deoxy-2'-fluoro-guanosine-3'-phosphate
  modified_base 7: mod_base = OTHER; note = 2'-O-methyl-adenosine-3'-phosphate
  modified_base 8: mod_base = OTHER; note = 2'-deoxy-2'-fluoro-guanosine-3'-phosphate
  modified_base 9: mod_base = OTHER; note = 2'-deoxy-2'-fluoro-uridine-3'-phosphate
  modified_base 10: mod_base = OTHER; note = 2'-O-methyl-adenosine-3'-phosphate
  modified_base 11: mod_base = OTHER; note = 2'-O-methyl-uridine-3'-phosphate
  modified_base 12: mod_base = OTHER; note = 2'-O-methyl-guanosine-3'-phosphate
  modified_base 13: mod_base = OTHER; note = 2'-O-methyl-guanosine-3'-phosphate
  modified_base 14: mod_base = OTHER; note = 2'-deoxy-2'-fluoro-cytidine-3'-phosphate
  modified_base 15: mod_base = OTHER; note = 2'-O-methyl-cytidine-3'-phosphate
  modified_base 16: mod_base = OTHER; note = 2'-deoxy-2'-fluoro-uridine-3'-phosphate
  modified_base 17: mod_base = OTHER; note = 2'-O-methyl-uridine-3'-phosphate
  modified_base 18: mod_base = OTHER; note = 2'-O-methyl-adenosine-3'-phosphate
  modified_base 19: mod_base = OTHER; note = 2'-O-methyl-cytidine-3'-phosphorothioate
  modified_base 20: mod_base = OTHER; note = 2'-O-methyl-uridine-3'-phosphorothioate
  modified_base 21: mod_base = OTHER; note = 2'-O-methyl-uridine-3'-phosphate
tgtaagagtatggccttactt

SEQ ID NO: 2148 - RNA, 21 nt, synthetic construct
  source 1..21: mol_type = other RNA
  modified_base 1: mod_base = OTHER; note = 2'-O-methyl-uridine-3'-phosphorothioate
  modified_base 2: mod_base = OTHER; note = 2'-deoxy-2'-fluoro-uridine-3'-phosphorothioate
  modified_base 3: mod_base = OTHER; note = 2'-O-methyl-guanosine-3'-phosphate
  modified_base 4: mod_base = OTHER; note = 2'-O-methyl-uridine-3'-phosphate
  modified_base 5: mod_base = OTHER; note = 2'-O-methyl-adenosine-3'-phosphate
  modified_base 6: mod_base = OTHER; note = 2'-deoxy-2'-fluoro-adenosine-3'-phosphate
  modified_base 7: mod_base = OTHER; note = 2'-O-methyl-guanosine-3'-phosphate
  modified_base 8: mod_base = OTHER; note = 2'-deoxy-2'-fluoro-adenosine-3'-phosphate
  modified_base 9: mod_base = OTHER; note = 2'-deoxy-2'-fluoro-guanosine-3'-phosphate
  modified_base 10: mod_base = OTHER; note = 2'-O-methyl-uridine-3'-phosphate
  modified_base 11: mod_base = OTHER; note = 2'-O-methyl-adenosine-3'-phosphate
  modified_base 12: mod_base = OTHER; note = 2'-O-methyl-uridine-3'-phosphate
  modified_base 13: mod_base = OTHER; note = 2'-O-methyl-guanosine-3'-phosphate
  modified_base 14: mod_base = OTHER; note = 2'-deoxy-2'-fluoro-guanosine-3'-phosphate
  modified_base 15: mod_base = OTHER; note = 2'-O-methyl-cytidine-3'-phosphate
  modified_base 16: mod_base = OTHER; note = 2'-deoxy-2'-fluoro-cytidine-3'-phosphate
  modified_base 17: mod_base = OTHER; note = 2'-O-methyl-uridine-3'-phosphate
  modified_base 18: mod_base = OTHER; note = 2'-O-methyl-uridine-3'-phosphate
  modified_base 19: mod_base = OTHER; note = 2'-O-methyl-adenosine-3'-phosphorothioate
  modified_base 20: mod_base = OTHER; note = 2'-O-methyl-uridine-3'-phosphorothioate
  modified_base 21: mod_base = OTHER; note = 2'-O-methyl-uridine-3'-phosphate
ttgtaagagtatggccttatt

SEQ ID NO: 2149 - RNA, 21 nt, synthetic construct
  source 1..21: mol_type = other RNA
  modified_base 1: mod_base = OTHER; note = 2'-O-methyl-uridine-3'-phosphorothioate
  modified_base 2: mod_base = OTHER; note = 2'-deoxy-2'-fluoro-uridine-3'-phosphorothioate
  modified_base 3: mod_base = OTHER; note = 2'-O-methyl-uridine-3'-phosphate
  modified_base 4: mod_base = OTHER; note = 2'-O-methyl-adenosine-3'-phosphate
  modified_base 5: mod_base = OTHER; note = 2'-O-methyl-uridine-3'-phosphate
  modified_base 6: mod_base = OTHER; note = 2'-deoxy-2'-fluoro-guanosine-3'-phosphate
  modified_base 7: mod_base = OTHER; note = 2'-O-methyl-uridine-3'-phosphate
  modified_base 8: mod_base = OTHER; note = 2'-deoxy-2'-fluoro-adenosine-3'-phosphate
  modified_base 9: mod_base = OTHER; note = 2'-deoxy-2'-fluoro-adenosine-3'-phosphate
  modified_base 10: mod_base = OTHER; note = 2'-O-methyl-guanosine-3'-phosphate
  modified_base 11: mod_base = OTHER; note = 2'-O-methyl-adenosine-3'-phosphate
  modified_base 12: mod_base = OTHER; note = 2'-O-methyl-guanosine-3'-phosphate
  modified_base 13: mod_base = OTHER; note = 2'-O-methyl-uridine-3'-phosphate
  modified_base 14: mod_base = OTHER; note = 2'-deoxy-2'-fluoro-adenosine-3'-phosphate
  modified_base 15: mod_base = OTHER; note = 2'-O-methyl-uridine-3'-phosphate
  modified_base 16: mod_base = OTHER; note = 2'-deoxy-2'-fluoro-guanosine-3'-phosphate
  modified_base 17: mod_base = OTHER; note = 2'-O-methyl-guanosine-3'-phosphate
  modified_base 18: mod_base = OTHER; note = 2'-O-methyl-cytidine-3'-phosphate
  modified_base 19: mod_base = OTHER; note = 2'-O-methyl-cytidine-3'-phosphorothioate
  modified_base 20: mod_base = OTHER; note = 2'-O-methyl-uridine-3'-phosphorothioate
  modified_base 21: mod_base = OTHER; note = 2'-O-methyl-uridine-3'-phosphate
tttatgtaagagtatggcctt

SEQ ID NO: 2150 - RNA, 21 nt, synthetic construct
  source 1..21: mol_type = other RNA
  modified_base 1: mod_base = OTHER; note = 2'-O-methyl-uridine-3'-phosphorothioate
  modified_base 2: mod_base = OTHER; note = 2'-deoxy-2'-fluoro-adenosine-3'-phosphorothioate
  modified_base 3: mod_base = OTHER; note = 2'-O-methyl-uridine-3'-phosphate
  modified_base 4: mod_base = OTHER; note = 2'-O-methyl-uridine-3'-phosphate
  modified_base 5: mod_base = OTHER; note = 2'-O-methyl-adenosine-3'-phosphate
  modified_base 6: mod_base = OTHER; note = 2'-deoxy-2'-fluoro-uridine-3'-phosphate
  modified_base 7: mod_base = OTHER; note = 2'-O-methyl-guanosine-3'-phosphate
  modified_base 8: mod_base = OTHER; note = 2'-deoxy-2'-fluoro-uridine-3'-phosphate
  modified_base 9: mod_base = OTHER; note = 2'-deoxy-2'-fluoro-adenosine-3'-phosphate
  modified_base 10: mod_base = OTHER; note = 2'-O-methyl-adenosine-3'-phosphate
  modified_base 11: mod_base = OTHER; note = 2'-O-methyl-guanosine-3'-phosphate
  modified_base 12: mod_base = OTHER; note = 2'-O-methyl-adenosine-3'-phosphate
  modified_base 13: mod_base = OTHER; note = 2'-O-methyl-guanosine-3'-phosphate
  modified_base 14: mod_base = OTHER; note = 2'-deoxy-2'-fluoro-uridine-3'-phosphate
  modified_base 15: mod_base = OTHER; note = 2'-O-methyl-adenosine-3'-phosphate
  modified_base 16: mod_base = OTHER; note = 2'-deoxy-2'-fluoro-uridine-3'-phosphate
  modified_base 17: mod_base = OTHER; note = 2'-O-methyl-guanosine-3'-phosphate
  modified_base 18: mod_base = OTHER; note = 2'-O-methyl-guanosine-3'-phosphate
  modified_base 19: mod_base = OTHER; note = 2'-O-methyl-cytidine-3'-phosphorothioate
  modified_base 20: mod_base = OTHER; note = 2'-O-methyl-uridine-3'-phosphorothioate
  modified_base 21: mod_base = OTHER; note = 2'-O-methyl-uridine-3'-phosphate
tattatgtaagagtatggctt

SEQ ID NO: 2151 - RNA, 21 nt, synthetic construct
  source 1..21: mol_type = other RNA
  modified_base 1: mod_base = OTHER; note = 2'-O-methyl-uridine-3'-phosphorothioate
  modified_base 2: mod_base = OTHER; note = 2'-deoxy-2'-fluoro-uridine-3'-phosphorothioate
  modified_base 3: mod_base = OTHER; note = 2'-O-methyl-adenosine-3'-phosphate
  modified_base 4: mod_base = OTHER; note = 2'-O-methyl-uridine-3'-phosphate
  modified_base 5: mod_base = OTHER; note = 2'-O-methyl-guanosine-3'-phosphate
  modified_base 6: mod_base = OTHER; note = 2'-deoxy-2'-fluoro-uridine-3'-phosphate
  modified_base 7: mod_base = OTHER; note = 2'-O-methyl-cytidine-3'-phosphate
  modified_base 8: mod_base = OTHER; note = 2'-deoxy-2'-fluoro-uridine-3'-phosphate
  modified_base 9: mod_base = OTHER; note = 2'-deoxy-2'-fluoro-uridine-3'-phosphate
  modified_base 10: mod_base = OTHER; note = 2'-O-methyl-adenosine-3'-phosphate
  modified_base 11: mod_base = OTHER; note = 2'-O-methyl-guanosine-3'-phosphate
  modified_base 12: mod_base = OTHER; note = 2'-O-methyl-adenosine-3'-phosphate
  modified_base 13: mod_base = OTHER; note = 2'-O-methyl-adenosine-3'-phosphate
  modified_base 14: mod_base = OTHER; note = 2'-deoxy-2'-fluoro-cytidine-3'-phosphate
  modified_base 15: mod_base = OTHER; note = 2'-O-methyl-adenosine-3'-phosphate
  modified_base 16: mod_base = OTHER; note = 2'-deoxy-2'-fluoro-guanosine-3'-phosphate
  modified_base 17: mod_base = OTHER; note = 2'-O-methyl-adenosine-3'-phosphate
  modified_base 18: mod_base = OTHER; note = 2'-O-methyl-uridine-3'-phosphate
  modified_base 19: mod_base = OTHER; note = 2'-O-methyl-uridine-3'-phosphorothioate
  modified_base 20: mod_base = OTHER; note = 2'-O-methyl-uridine-3'-phosphorothioate
  modified_base 21: mod_base = OTHER; note = 2'-O-methyl-uridine-3'-phosphate
ttatgtcttagaacagatttt

SEQ ID NO: 2152 - RNA, 21 nt, synthetic construct
  source 1..21: mol_type = other RNA
  modified_base 1: mod_base = OTHER; note = 2'-O-methyl-uridine-3'-phosphorothioate
  modified_base 2: mod_base = OTHER; note = 2'-deoxy-2'-fluoro-cytidine-3'-phosphorothioate
  modified_base 3: mod_base = OTHER; note = 2'-O-methyl-adenosine-3'-phosphate
  modified_base 4: mod_base = OTHER; note = 2'-O-methyl-uridine-3'-phosphate
  modified_base 5: mod_base = OTHER; note = 2'-O-methyl-adenosine-3'-phosphate
  modified_base 6: mod_base = OTHER; note = 2'-deoxy-2'-fluoro-uridine-3'-phosphate
  modified_base 7: mod_base = OTHER; note = 2'-O-methyl-guanosine-3'-phosphate
  modified_base 8: mod_base = OTHER; note = 2'-deoxy-2'-fluoro-uridine-3'-phosphate
  modified_base 9: mod_base = OTHER; note = 2'-deoxy-2'-fluoro-cytidine-3'-phosphate
  modified_base 10: mod_base = OTHER; note = 2'-O-methyl-uridine-3'-phosphate
  modified_base 11: mod_base = OTHER; note = 2'-O-methyl-uridine-3'-phosphate
  modified_base 12: mod_base = OTHER; note = 2'-O-methyl-adenosine-3'-phosphate
  modified_base 13: mod_base = OTHER; note = 2'-O-methyl-guanosine-3'-phosphate
  modified_base 14: mod_base = OTHER; note = 2'-deoxy-2'-fluoro-adenosine-3'-phosphate
  modified_base 15: mod_base = OTHER; note = 2'-O-methyl-adenosine-3'-phosphate
  modified_base 16: mod_base = OTHER; note = 2'-deoxy-2'-fluoro-cytidine-3'-phosphate
  modified_base 17: mod_base = OTHER; note = 2'-O-methyl-adenosine-3'-phosphate
  modified_base 18: mod_base = OTHER; note = 2'-O-methyl-guanosine-3'-phosphate
  modified_base 19: mod_base = OTHER; note = 2'-O-methyl-adenosine-3'-phosphorothioate
  modified_base 20: mod_base = OTHER; note = 2'-O-methyl-uridine-3'-phosphorothioate
  modified_base 21: mod_base = OTHER; note = 2'-O-methyl-uridine-3'-phosphate
tcatatgtcttagaacagatt

SEQ ID NO: 2153 - RNA, 21 nt, synthetic construct
  source 1..21: mol_type = other RNA
  modified_base 1: mod_base = OTHER; note = 2'-O-methyl-uridine-3'-phosphorothioate
  modified_base 2: mod_base = OTHER; note = 2'-deoxy-2'-fluoro-guanosine-3'-phosphorothioate
  modified_base 3: mod_base = OTHER; note = 2'-O-methyl-adenosine-3'-phosphate
  modified_base 4: mod_base = OTHER; note = 2'-O-methyl-uridine-3'-phosphate
  modified_base 5: mod_base = OTHER; note = 2'-O-methyl-cytidine-3'-phosphate
  modified_base 6: mod_base = OTHER; note = 2'-deoxy-2'-fluoro-adenosine-3'-phosphate
  modified_base 7: mod_base = OTHER; note = 2'-O-methyl-uridine-3'-phosphate
  modified_base 8: mod_base = OTHER; note = 2'-deoxy-2'-fluoro-adenosine-3'-phosphate
  modified_base 9: mod_base = OTHER; note = 2'-deoxy-2'-fluoro-uridine-3'-phosphate
  modified_base 10: mod_base = OTHER; note = 2'-O-methyl-guanosine-3'-phosphate
  modified_base 11: mod_base = OTHER; note = 2'-O-methyl-uridine-3'-phosphate
  modified_base 12: mod_base = OTHER; note = 2'-O-methyl-cytidine-3'-phosphate
  modified_base 13: mod_base = OTHER; note = 2'-O-methyl-uridine-3'-phosphate
  modified_base 14: mod_base = OTHER; note = 2'-deoxy-2'-fluoro-uridine-3'-phosphate
  modified_base 15: mod_base = OTHER; note = 2'-O-methyl-adenosine-3'-phosphate
  modified_base 16: mod_base = OTHER; note = 2'-deoxy-2'-fluoro-guanosine-3'-phosphate
  modified_base 17: mod_base = OTHER; note = 2'-O-methyl-adenosine-3'-phosphate
  modified_base 18: mod_base = OTHER; note = 2'-O-methyl-adenosine-3'-phosphate
  modified_base 19: mod_base = OTHER; note = 2'-O-methyl-cytidine-3'-phosphorothioate
  modified_base 20: mod_base = OTHER; note = 2'-O-methyl-uridine-3'-phosphorothioate
  modified_base 21: mod_base = OTHER; note = 2'-O-methyl-uridine-3'-phosphate
tgatcatatgtcttagaactt

SEQ ID NO: 2154 - RNA, 21 nt, synthetic construct
  source 1..21: mol_type = other RNA
  modified_base 1: mod_base = OTHER; note = 2'-O-methyl-uridine-3'-phosphorothioate
  modified_base 2: mod_base = OTHER; note = 2'-deoxy-2'-fluoro-uridine-3'-phosphorothioate
  modified_base 3: mod_base = OTHER; note = 2'-O-methyl-guanosine-3'-phosphate
  modified_base 4: mod_base = OTHER; note = 2'-O-methyl-adenosine-3'-phosphate
  modified_base 5: mod_base = OTHER; note = 2'-O-methyl-uridine-3'-phosphate
  modified_base 6: mod_base = OTHER; note = 2'-deoxy-2'-fluoro-cytidine-3'-phosphate
  modified_base 7: mod_base = OTHER; note = 2'-O-methyl-adenosine-3'-phosphate
  modified_base 8: mod_base = OTHER; note = 2'-deoxy-2'-fluoro-uridine-3'-phosphate
  modified_base 9: mod_base = OTHER; note = 2'-deoxy-2'-fluoro-adenosine-3'-phosphate
  modified_base 10: mod_base = OTHER; note = 2'-O-methyl-uridine-3'-phosphate
  modified_base 11: mod_base = OTHER; note = 2'-O-methyl-guanosine-3'-phosphate
  modified_base 12: mod_base = OTHER; note = 2'-O-methyl-uridine-3'-phosphate
  modified_base 13: mod_base = OTHER; note = 2'-O-methyl-cytidine-3'-phosphate
  modified_base 14: mod_base = OTHER; note = 2'-deoxy-2'-fluoro-uridine-3'-phosphate
  modified_base 15: mod_base = OTHER; note = 2'-O-methyl-uridine-3'-phosphate
  modified_base 16: mod_base = OTHER; note = 2'-deoxy-2'-fluoro-adenosine-3'-phosphate
  modified_base 17: mod_base = OTHER; note = 2'-O-methyl-guanosine-3'-phosphate
  modified_base 18: mod_base = OTHER; note = 2'-O-methyl-adenosine-3'-phosphate
  modified_base 19: mod_base = OTHER; note = 2'-O-methyl-adenosine-3'-phosphorothioate
  modified_base 20: mod_base = OTHER; note = 2'-O-methyl-uridine-3'-phosphorothioate
  modified_base 21: mod_base = OTHER; note = 2'-O-methyl-uridine-3'-phosphate
ttgatcatatgtcttagaatt

SEQ ID NO: 2155 - RNA, 21 nt, synthetic construct
  source 1..21: mol_type = other RNA
  modified_base 1: mod_base = OTHER; note = 2'-O-methyl-uridine-3'-phosphorothioate
  modified_base 2: mod_base = OTHER; note = 2'-deoxy-2'-fluoro-uridine-3'-phosphorothioate
  modified_base 3: mod_base = OTHER; note = 2'-O-methyl-uridine-3'-phosphate
  modified_base 4: mod_base = OTHER; note = 2'-O-methyl-guanosine-3'-phosphate
  modified_base 5: mod_base = OTHER; note = 2'-O-methyl-adenosine-3'-phosphate
  modified_base 6: mod_base = OTHER; note = 2'-deoxy-2'-fluoro-uridine-3'-phosphate
  modified_base 7: mod_base = OTHER; note = 2'-O-methyl-cytidine-3'-phosphate
  modified_base 8: mod_base = OTHER; note = 2'-deoxy-2'-fluoro-adenosine-3'-phosphate
  modified_base 9: mod_base = OTHER; note = 2'-deoxy-2'-fluoro-uridine-3'-phosphate
  modified_base 10: mod_base = OTHER; note = 2'-O-methyl-adenosine-3'-phosphate
  modified_base 11: mod_base = OTHER; note = 2'-O-methyl-uridine-3'-phosphate
  modified_base 12: mod_base = OTHER; note = 2'-O-methyl-guanosine-3'-phosphate
  modified_base 13: mod_base = OTHER; note = 2'-O-methyl-uridine-3'-phosphate
  modified_base 14: mod_base = OTHER; note = 2'-deoxy-2'-fluoro-cytidine-3'-phosphate
  modified_base 15: mod_base = OTHER; note = 2'-O-methyl-uridine-3'-phosphate
  modified_base 16: mod_base = OTHER; note = 2'-deoxy-2'-fluoro-uridine-3'-phosphate
  modified_base 17: mod_base = OTHER; note = 2'-O-methyl-adenosine-3'-phosphate
  modified_base 18: mod_base = OTHER; note = 2'-O-methyl-guanosine-3'-phosphate
  modified_base 19: mod_base = OTHER; note = 2'-O-methyl-adenosine-3'-phosphorothioate
  modified_base 20: mod_base = OTHER; note = 2'-O-methyl-uridine-3'-phosphorothioate
  modified_base 21: mod_base = OTHER; note = 2'-O-methyl-uridine-3'-phosphate
tttgatcatatgtcttagatt

SEQ ID NO: 2156 - RNA, 21 nt, synthetic construct
  source 1..21: mol_type = other RNA
  modified_base 1: mod_base = OTHER; note = 2'-O-methyl-uridine-3'-phosphorothioate
  modified_base 2: mod_base = OTHER; note = 2'-deoxy-2'-fluoro-uridine-3'-phosphorothioate
  modified_base 3: mod_base = OTHER; note = 2'-O-methyl-cytidine-3'-phosphate
  modified_base 4: mod_base = OTHER; note = 2'-O-methyl-uridine-3'-phosphate
  modified_base 5: mod_base = OTHER; note = 2'-O-methyl-guanosine-3'-phosphate
  modified_base 6: mod_base = OTHER; note = 2'-deoxy-2'-fluoro-uridine-3'-phosphate
  modified_base 7: mod_base = OTHER; note = 2'-O-methyl-uridine-3'-phosphate
  modified_base 8: mod_base = OTHER; note = 2'-deoxy-2'-fluoro-guanosine-3'-phosphate
  modified_base 9: mod_base = OTHER; note = 2'-deoxy-2'-fluoro-adenosine-3'-phosphate
  modified_base 10: mod_base = OTHER; note = 2'-O-methyl-uridine-3'-phosphate
  modified_base 11: mod_base = OTHER; note = 2'-O-methyl-cytidine-3'-phosphate
  modified_base 12: mod_base = OTHER; note = 2'-O-methyl-adenosine-3'-phosphate
  modified_base 13: mod_base = OTHER; note = 2'-O-methyl-uridine-3'-phosphate
  modified_base 14: mod_base = OTHER; note = 2'-deoxy-2'-fluoro-adenosine-3'-phosphate
  modified_base 15: mod_base = OTHER; note = 2'-O-methyl-uridine-3'-phosphate
  modified_base 16: mod_base = OTHER; note = 2'-deoxy-2'-fluoro-guanosine-3'-phosphate
  modified_base 17: mod_base = OTHER; note = 2'-O-methyl-uridine-3'-phosphate
  modified_base 18: mod_base = OTHER; note = 2'-O-methyl-cytidine-3'-phosphate
  modified_base 19: mod_base = OTHER; note = 2'-O-methyl-uridine-3'-phosphorothioate
  modified_base 20: mod_base = OTHER; note = 2'-O-methyl-uridine-3'-phosphorothioate
  modified_base 21: mod_base = OTHER; note = 2'-O-methyl-uridine-3'-phosphate
ttctgttgatcatatgtcttt

SEQ ID NO: 2157 - RNA, 21 nt, synthetic construct
  source 1..21: mol_type = other RNA
  modified_base 1: mod_base = OTHER; note = 2'-O-methyl-uridine-3'-phosphorothioate
  modified_base 2: mod_base = OTHER; note = 2'-deoxy-2'-fluoro-adenosine-3'-phosphorothioate
  modified_base 3: mod_base = OTHER; note = 2'-O-methyl-uridine-3'-phosphate
  modified_base 4: mod_base = OTHER; note = 2'-O-methyl-cytidine-3'-phosphate
  modified_base 5: mod_base = OTHER; note = 2'-O-methyl-uridine-3'-phosphate
  modified_base 6: mod_base = OTHER; note = 2'-deoxy-2'-fluoro-guanosine-3'-phosphate
  modified_base 7: mod_base = OTHER; note = 2'-O-methyl-uridine-3'-phosphate
  modified_base 8: mod_base = OTHER; note = 2'-deoxy-2'-fluoro-uridine-3'-phosphate
  modified_base 9: mod_base = OTHER; note = 2'-deoxy-2'-fluoro-guanosine-3'-phosphate
  modified_base 10: mod_base = OTHER; note = 2'-O-methyl-adenosine-3'-phosphate
  modified_base 11: mod_base = OTHER; note = 2'-O-methyl-uridine-3'-phosphate
  modified_base 12: mod_base = OTHER; note = 2'-O-methyl-cytidine-3'-phosphate
  modified_base 13: mod_base = OTHER; note = 2'-O-methyl-adenosine-3'-phosphate
  modified_base 14: mod_base = OTHER; note = 2'-deoxy-2'-fluoro-uridine-3'-phosphate
  modified_base 15: mod_base = OTHER; note = 2'-O-methyl-adenosine-3'-phosphate
  modified_base 16: mod_base = OTHER; note = 2'-deoxy-2'-fluoro-uridine-3'-phosphate
  modified_base 17: mod_base = OTHER; note = 2'-O-methyl-guanosine-3'-phosphate
  modified_base 18: mod_base = OTHER; note = 2'-O-methyl-uridine-3'-phosphate
  modified_base 19: mod_base = OTHER; note = 2'-O-methyl-cytidine-3'-phosphorothioate
  modified_base 20: mod_base = OTHER; note = 2'-O-methyl-uridine-3'-phosphorothioate
  modified_base 21: mod_base = OTHER; note = 2'-O-methyl-uridine-3'-phosphate
tatctgttgatcatatgtctt

SEQ ID NO: 2158 - RNA, 21 nt, synthetic construct
  source 1..21: mol_type = other RNA
  modified_base 1: mod_base = OTHER; note = 2'-O-methyl-uridine-3'-phosphorothioate
  modified_base 2: mod_base = OTHER; note = 2'-deoxy-2'-fluoro-cytidine-3'-phosphorothioate
  modified_base 3: mod_base = OTHER; note = 2'-O-methyl-adenosine-3'-phosphate
  modified_base 4: mod_base = OTHER; note = 2'-O-methyl-uridine-3'-phosphate
  modified_base 5: mod_base = OTHER; note = 2'-O-methyl-cytidine-3'-phosphate
  modified_base 6: mod_base = OTHER; note = 2'-deoxy-2'-fluoro-uridine-3'-phosphate
  modified_base 7: mod_base = OTHER; note = 2'-O-methyl-guanosine-3'-phosphate
  modified_base 8: mod_base = OTHER; note = 2'-deoxy-2'-fluoro-uridine-3'-phosphate
  modified_base 9: mod_base = OTHER; note = 2'-deoxy-2'-fluoro-uridine-3'-phosphate
  modified_base 10: mod_base = OTHER; note = 2'-O-methyl-guanosine-3'-phosphate
  modified_base 11: mod_base = OTHER; note = 2'-O-methyl-adenosine-3'-phosphate
  modified_base 12: mod_base = OTHER; note = 2'-O-methyl-uridine-3'-phosphate
  modified_base 13: mod_base = OTHER; note = 2'-O-methyl-cytidine-3'-phosphate
  modified_base 14: mod_base = OTHER; note = 2'-deoxy-2'-fluoro-adenosine-3'-phosphate
  modified_base 15: mod_base = OTHER; note = 2'-O-methyl-uridine-3'-phosphate
  modified_base 16: mod_base = OTHER; note = 2'-deoxy-2'-fluoro-adenosine-3'-phosphate
  modified_base 17: mod_base = OTHER; note = 2'-O-methyl-uridine-3'-phosphate
  modified_base 18: mod_base = OTHER; note = 2'-O-methyl-guanosine-3'-phosphate
  modified_base 19: mod_base = OTHER; note = 2'-O-methyl-uridine-3'-phosphorothioate
  modified_base 20: mod_base = OTHER; note = 2'-O-methyl-uridine-3'-phosphorothioate
  modified_base 21: mod_base = OTHER; note = 2'-O-methyl-uridine-3'-phosphate
tcatctgttgatcatatgttt

SEQ ID NO: 2159 - RNA, 21 nt, synthetic construct
  source 1..21: mol_type = other RNA
  modified_base 1: mod_base = OTHER; note = 2'-O-methyl-uridine-3'-phosphorothioate
  modified_base 2: mod_base = OTHER; note = 2'-deoxy-2'-fluoro-uridine-3'-phosphorothioate
  modified_base 3: mod_base = OTHER; note = 2'-O-methyl-cytidine-3'-phosphate
  modified_base 4: mod_base = OTHER; note = 2'-O-methyl-uridine-3'-phosphate
  modified_base 5: mod_base = OTHER; note = 2'-O-methyl-cytidine-3'-phosphate
  modified_base 6: mod_base = OTHER; note = 2'-deoxy-2'-fluoro-adenosine-3'-phosphate
  modified_base 7: mod_base = OTHER; note = 2'-O-methyl-uridine-3'-phosphate
  modified_base 8: mod_base = OTHER; note = 2'-deoxy-2'-fluoro-cytidine-3'-phosphate
  modified_base 9: mod_base = OTHER; note = 2'-deoxy-2'-fluoro-uridine-3'-phosphate
  modified_base 10: mod_base = OTHER; note = 2'-O-methyl-guanosine-3'-phosphate
  modified_base 11: mod_base = OTHER; note = 2'-O-methyl-uridine-3'-phosphate
  modified_base 12: mod_base = OTHER; note = 2'-O-methyl-uridine-3'-phosphate
  modified_base 13: mod_base = OTHER; note = 2'-O-methyl-guanosine-3'-phosphate
  modified_base 14: mod_base = OTHER; note = 2'-deoxy-2'-fluoro-adenosine-3'-phosphate
  modified_base 15: mod_base = OTHER; note = 2'-O-methyl-uridine-3'-phosphate
  modified_base 16: mod_base = OTHER; note = 2'-deoxy-2'-fluoro-cytidine-3'-phosphate
  modified_base 17: mod_base = OTHER; note = 2'-O-methyl-adenosine-3'-phosphate
  modified_base 18: mod_base = OTHER; note = 2'-O-methyl-uridine-3'-phosphate
  modified_base 19: mod_base = OTHER; note = 2'-O-methyl-adenosine-3'-phosphorothioate
  modified_base 20: mod_base = OTHER; note = 2'-O-methyl-uridine-3'-phosphorothioate
  modified_base 21: mod_base = OTHER; note = 2'-O-methyl-uridine-3'-phosphate
ttctcatctgttgatcatatt

SEQ ID NO: 2160 - RNA, 21 nt, synthetic construct
  source 1..21: mol_type = other RNA
  modified_base 1: mod_base = OTHER; note = 2'-O-methyl-uridine-3'-phosphorothioate
  modified_base 2: mod_base = OTHER; note = 2'-deoxy-2'-fluoro-uridine-3'-phosphorothioate
  modified_base 3: mod_base = OTHER; note = 2'-O-methyl-uridine-3'-phosphate
  modified_base 4: mod_base = OTHER; note = 2'-O-methyl-cytidine-3'-phosphate
  modified_base 5: mod_base = OTHER; note = 2'-O-methyl-uridine-3'-phosphate
  modified_base 6: mod_base = OTHER; note = 2'-deoxy-2'-fluoro-cytidine-3'-phosphate
  modified_base 7: mod_base = OTHER; note = 2'-O-methyl-adenosine-3'-phosphate
  modified_base 8: mod_base = OTHER; note = 2'-deoxy-2'-fluoro-uridine-3'-phosphate
  modified_base 9: mod_base = OTHER; note = 2'-deoxy-2'-fluoro-cytidine-3'-phosphate
  modified_base 10: mod_base = OTHER; note = 2'-O-methyl-uridine-3'-phosphate
  modified_base 11: mod_base = OTHER; note = 2'-O-methyl-guanosine-3'-phosphate
  modified_base 12: mod_base = OTHER; note = 2'-O-methyl-uridine-3'-phosphate
  modified_base 13: mod_base = OTHER; note = 2'-O-methyl-uridine-3'-phosphate
  modified_base 14: mod_base = OTHER; note = 2'-deoxy-2'-fluoro-guanosine-3'-phosphate
  modified_base 15: mod_base = OTHER; note = 2'-O-methyl-adenosine-3'-phosphate
  modified_base 16: mod_base = OTHER; note = 2'-deoxy-2'-fluoro-uridine-3'-phosphate
  modified_base 17: mod_base = OTHER; note = 2'-O-methyl-cytidine-3'-phosphate
  modified_base 18: mod_base = OTHER; note = 2'-O-methyl-adenosine-3'-phosphate
  modified_base 19: mod_base = OTHER; note = 2'-O-methyl-uridine-3'-phosphorothioate
  modified_base 20: mod_base = OTHER; note = 2'-O-methyl-uridine-3'-phosphorothioate
  modified_base 21: mod_base = OTHER; note = 2'-O-methyl-uridine-3'-phosphate
tttctcatctgttgatcattt

SEQ ID NO: 2161 - RNA, 21 nt, synthetic construct
  source 1..21: mol_type = other RNA
  modified_base 1: mod_base = OTHER; note = 2'-O-methyl-uridine-3'-phosphorothioate
  modified_base 2: mod_base = OTHER; note = 2'-deoxy-2'-fluoro-uridine-3'-phosphorothioate
  modified_base 3: mod_base = OTHER; note = 2'-O-methyl-adenosine-3'-phosphate
  modified_base 4: mod_base = OTHER; note = 2'-O-methyl-uridine-3'-phosphate
  modified_base 5: mod_base = OTHER; note = 2'-O-methyl-guanosine-3'-phosphate
  modified_base 6: mod_base = OTHER; note = 2'-deoxy-2'-fluoro-adenosine-3'-phosphate
  modified_base 7: mod_base = OTHER; note = 2'-O-methyl-cytidine-3'-phosphate
  modified_base 8: mod_base = OTHER; note = 2'-deoxy-2'-fluoro-uridine-3'-phosphate
  modified_base 9: mod_base = OTHER; note = 2'-deoxy-2'-fluoro-adenosine-3'-phosphate
  modified_base 10: mod_base = OTHER; note = 2'-O-methyl-adenosine-3'-phosphate
  modified_base 11: mod_base = OTHER; note = 2'-O-methyl-uridine-3'-phosphate
  modified_base 12: mod_base = OTHER; note = 2'-O-methyl-cytidine-3'-phosphate
  modified_base 13: mod_base = OTHER; note = 2'-O-methyl-uridine-3'-phosphate
  modified_base 14: mod_base = OTHER; note = 2'-deoxy-2'-fluoro-cytidine-3'-phosphate
  modified_base 15: mod_base = OTHER; note = 2'-O-methyl-adenosine-3'-phosphate
  modified_base 16: mod_base = OTHER; note = 2'-deoxy-2'-fluoro-cytidine-3'-phosphate
  modified_base 17: mod_base = OTHER; note = 2'-O-methyl-uridine-3'-phosphate
  modified_base 18: mod_base = OTHER; note = 2'-O-methyl-guanosine-3'-phosphate
  modified_base 19: mod_base = OTHER; note = 2'-O-methyl-uridine-3'-phosphorothioate
  modified_base 20: mod_base = OTHER; note = 2'-O-methyl-uridine-3'-phosphorothioate
  modified_base 21: mod_base = OTHER; note = 2'-O-methyl-uridine-3'-phosphate
ttatgactaatctcactgttt

SEQ ID NO: 2162 - RNA, 21 nt, synthetic construct
  source 1..21: mol_type = other RNA
  modified_base 1: mod_base = OTHER; note = 2'-O-methyl-uridine-3'-phosphorothioate
  modified_base 2: mod_base = OTHER; note = 2'-deoxy-2'-fluoro-adenosine-3'-phosphorothioate
  modified_base 3: mod_base = OTHER; note = 2'-O-methyl-uridine-3'-phosphate
  modified_base 4: mod_base = OTHER; note = 2'-O-methyl-adenosine-3'-phosphate
  modified_base 5: mod_base = OTHER; note = 2'-O-methyl-uridine-3'-phosphate
  modified_base 6: mod_base = OTHER; note = 2'-deoxy-2'-fluoro-guanosine-3'-phosphate
  modified_base 7: mod_base = OTHER; note = 2'-O-methyl-adenosine-3'-phosphate
  modified_base 8: mod_base = OTHER; note = 2'-deoxy-2'-fluoro-cytidine-3'-phosphate
  modified_base 9: mod_base = OTHER; note = 2'-deoxy-2'-fluoro-uridine-3'-phosphate
  modified_base 10: mod_base = OTHER; note = 2'-O-methyl-adenosine-3'-phosphate
  modified_base 11: mod_base = OTHER; note = 2'-O-methyl-adenosine-3'-phosphate
  modified_base 12: mod_base = OTHER; note = 2'-O-methyl-uridine-3'-phosphate
  modified_base 13: mod_base = OTHER; note = 2'-O-methyl-cytidine-3'-phosphate
  modified_base 14: mod_base = OTHER; note = 2'-deoxy-2'-fluoro-uridine-3'-phosphate
  modified_base 15: mod_base = OTHER; note = 2'-O-methyl-cytidine-3'-phosphate
  modified_base 16: mod_base = OTHER; note = 2'-deoxy-2'-fluoro-adenosine-3'-phosphate
  modified_base 17: mod_base = OTHER; note = 2'-O-methyl-cytidine-3'-phosphate
  modified_base 18: mod_base = OTHER; note = 2'-O-methyl-uridine-3'-phosphate
  modified_base 19: mod_base = OTHER; note = 2'-O-methyl-guanosine-3'-phosphorothioate
  modified_base 20: mod_base = OTHER; note = 2'-O-methyl-uridine-3'-phosphorothioate
  modified_base 21: mod_base = OTHER; note = 2'-O-methyl-uridine-3'-phosphate
tatatgactaatctcactgtt

SEQ ID NO: 2163 - RNA, 21 nt, synthetic construct
  source 1..21: mol_type = other RNA
  modified_base 1: mod_base = OTHER; note = 2'-O-methyl-uridine-3'-phosphorothioate
  modified_base 2: mod_base = OTHER; note = 2'-deoxy-2'-fluoro-uridine-3'-phosphorothioate
  modified_base 3: mod_base = OTHER; note = 2'-O-methyl-guanosine-3'-phosphate
  modified_base 4: mod_base = OTHER; note = 2'-O-methyl-adenosine-3'-phosphate
  modified_base 5: mod_base = OTHER; note = 2'-O-methyl-uridine-3'-phosphate
  modified_base 6: mod_base = OTHER; note = 2'-deoxy-2'-fluoro-adenosine-3'-phosphate
  modified_base 7: mod_base = OTHER; note = 2'-O-methyl-uridine-3'-phosphate
  modified_base 8: mod_base = OTHER; note = 2'-deoxy-2'-fluoro-guanosine-3'-phosphate
  modified_base 9: mod_base = OTHER; note = 2'-deoxy-2'-fluoro-adenosine-3'-phosphate
  modified_base 10: mod_base = OTHER; note = 2'-O-methyl-cytidine-3'-phosphate
  modified_base 11: mod_base = OTHER; note = 2'-O-methyl-uridine-3'-phosphate
  modified_base 12: mod_base = OTHER; note = 2'-O-methyl-adenosine-3'-phosphate
  modified_base 13: mod_base = OTHER; note = 2'-O-methyl-adenosine-3'-phosphate
  modified_base 14: mod_base = OTHER; note = 2'-deoxy-2'-fluoro-uridine-3'-phosphate
  modified_base 15: mod_base = OTHER; note = 2'-O-methyl-cytidine-3'-phosphate
  modified_base 16: mod_base = OTHER; note = 2'-deoxy-2'-fluoro-uridine-3'-phosphate
  modified_base 17: mod_base = OTHER; note = 2'-O-methyl-cytidine-3'-phosphate
  modified_base 18: mod_base = OTHER; note = 2'-O-methyl-adenosine-3'-phosphate
  modified_base 19: mod_base = OTHER; note = 2'-O-methyl-cytidine-3'-phosphorothioate
  modified_base 20: mod_base = OTHER; note = 2'-O-methyl-uridine-3'-phosphorothioate
  modified_base 21: mod_base = OTHER; note = 2'-O-methyl-uridine-3'-phosphate
ttgatatgactaatctcactt

SEQ ID NO: 2164 - RNA, 21 nt, synthetic construct
  source 1..21: mol_type = other RNA
  modified_base 1: mod_base = OTHER; note = 2'-O-methyl-uridine-3'-phosphorothioate
  modified_base 2: mod_base = OTHER; note = 2'-deoxy-2'-fluoro-adenosine-3'-phosphorothioate
  modified_base 3: mod_base = OTHER; note = 2'-O-methyl-guanosine-3'-phosphate
  modified_base 4: mod_base = OTHER; note = 2'-O-methyl-uridine-3'-phosphate
  modified_base 5: mod_base = OTHER; note = 2'-O-methyl-adenosine-3'-phosphate
  modified_base 6: mod_base = OTHER; note = 2'-deoxy-2'-fluoro-uridine-3'-phosphate
  modified_base 7: mod_base = OTHER; note = 2'-O-methyl-guanosine-3'-phosphate
  modified_base 8: mod_base = OTHER; note = 2'-deoxy-2'-fluoro-guanosine-3'-phosphate
  modified_base 9: mod_base = OTHER; note = 2'-deoxy-2'-fluoro-uridine-3'-phosphate
  modified_base 10: mod_base = OTHER; note = 2'-O-methyl-adenosine-3'-phosphate
  modified_base 11: mod_base = OTHER; note = 2'-O-methyl-adenosine-3'-phosphate
  modified_base 12: mod_base = OTHER; note = 2'-O-methyl-guanosine-3'-phosphate
  modified_base 13: mod_base = OTHER; note = 2'-O-methyl-cytidine-3'-phosphate
  modified_base 14: mod_base = OTHER; note = 2'-deoxy-2'-fluoro-uridine-3'-phosphate
  modified_base 15: mod_base = OTHER; note = 2'-O-methyl-adenosine-3'-phosphate
  modified_base 16: mod_base = OTHER; note = 2'-deoxy-2'-fluoro-guanosine-3'-phosphate
  modified_base 17: mod_base = OTHER; note = 2'-O-methyl-guanosine-3'-phosphate
  modified_base 18: mod_base = OTHER; note = 2'-O-methyl-uridine-3'-phosphate
  modified_base 19: mod_base = OTHER; note = 2'-O-methyl-adenosine-3'-phosphorothioate
  modified_base 20: mod_base = OTHER; note = 2'-O-methyl-uridine-3'-phosphorothioate
  modified_base 21: mod_base = OTHER; note = 2'-O-methyl-uridine-3'-phosphate
tagtatggtaagctaggtatt

SEQ ID NO: 2165 - RNA, 21 nt, synthetic construct
  source 1..21: mol_type = other RNA
  modified_base 1: mod_base = OTHER; note = 2'-O-methyl-uridine-3'-phosphorothioate
  modified_base 2: mod_base = OTHER; note = 2'-deoxy-2'-fluoro-uridine-3'-phosphorothioate
  modified_base 3: mod_base = OTHER; note = 2'-O-methyl-adenosine-3'-phosphate
  modified_base 4: mod_base = OTHER; note = 2'-O-methyl-guanosine-3'-phosphate
  modified_base 5: mod_base = OTHER; note = 2'-O-methyl-uridine-3'-phosphate
  modified_base 6: mod_base = OTHER; note = 2'-deoxy-2'-fluoro-adenosine-3'-phosphate
  modified_base 7: mod_base = OTHER; note = 2'-O-methyl-uridine-3'-phosphate
  modified_base 8: mod_base = OTHER; note = 2'-deoxy-2'-fluoro-guanosine-3'-phosphate
  modified_base 9: mod_base = OTHER; note = 2'-deoxy-2'-fluoro-guanosine-3'-phosphate
  modified_base 10: mod_base = OTHER; note = 2'-O-methyl-uridine-3'-phosphate
  modified_base 11: mod_base = OTHER; note = 2'-O-methyl-adenosine-3'-phosphate
  modified_base 12: mod_base = OTHER; note = 2'-O-methyl-adenosine-3'-phosphate
  modified_base 13: mod_base = OTHER; note = 2'-O-methyl-guanosine-3'-phosphate
  modified_base 14: mod_base = OTHER; note = 2'-deoxy-2'-fluoro-cytidine-3'-phosphate
  modified_base 15: mod_base = OTHER; note = 2'-O-methyl-uridine-3'-phosphate
  modified_base 16: mod_base = OTHER; note = 2'-deoxy-2'-fluoro-adenosine-3'-phosphate
  modified_base 17: mod_base = OTHER; note = 2'-O-methyl-guanosine-3'-phosphate
  modified_base 18: mod_base = OTHER; note = 2'-O-methyl-guanosine-3'-phosphate
  modified_base 19: mod_base = OTHER; note = 2'-O-methyl-uridine-3'-phosphorothioate
  modified_base 20: mod_base = OTHER; note = 2'-O-methyl-uridine-3'-phosphorothioate
  modified_base 21: mod_base = OTHER; note = 2'-O-methyl-uridine-3'-phosphate
ttagtatggtaagctaggttt

SEQ ID NO: 2166 - RNA, 21 nt, synthetic construct
  source 1..21: mol_type = other RNA
  modified_base 1: mod_base = OTHER; note = 2'-O-methyl-uridine-3'-phosphorothioate
  modified_base 2: mod_base = OTHER; note = 2'-deoxy-2'-fluoro-adenosine-3'-phosphorothioate
  modified_base 3: mod_base = OTHER; note = 2'-O-methyl-uridine-3'-phosphate
  modified_base 4: mod_base = OTHER; note = 2'-O-methyl-adenosine-3'-phosphate
  modified_base 5: mod_base = OTHER; note = 2'-O-methyl-guanosine-3'-phosphate
  modified_base 6: mod_base = OTHER; note = 2'-deoxy-2'-fluoro-uridine-3'-phosphate
  modified_base 7: mod_base = OTHER; note = 2'-O-methyl-adenosine-3'-phosphate
  modified_base 8: mod_base = OTHER; note = 2'-deoxy-2'-fluoro-uridine-3'-phosphate
  modified_base 9: mod_base = OTHER; note = 2'-deoxy-2'-fluoro-guanosine-3'-phosphate
  modified_base 10: mod_base = OTHER; note = 2'-O-methyl-guanosine-3'-phosphate
  modified_base 11: mod_base = OTHER; note = 2'-O-methyl-uridine-3'-phosphate
  modified_base 12: mod_base = OTHER; note = 2'-O-methyl-adenosine-3'-phosphate
  modified_base 13: mod_base = OTHER; note = 2'-O-methyl-adenosine-3'-phosphate
  modified_base 14: mod_base = OTHER; note = 2'-deoxy-2'-fluoro-guanosine-3'-phosphate
  modified_base 15: mod_base = OTHER; note = 2'-O-methyl-cytidine-3'-phosphate
  modified_base 16: mod_base = OTHER; note = 2'-deoxy-2'-fluoro-uridine-3'-phosphate
  modified_base 17: mod_base = OTHER; note = 2'-O-methyl-adenosine-3'-phosphate
  modified_base 18: mod_base = OTHER; note = 2'-O-methyl-guanosine-3'-phosphate
  modified_base 19: mod_base = OTHER; note = 2'-O-methyl-guanosine-3'-phosphorothioate
  modified_base 20: mod_base = OTHER; note = 2'-O-methyl-uridine-3'-phosphorothioate
  modified_base 21: mod_base = OTHER; note = 2'-O-methyl-uridine-3'-phosphate
tatagtatggtaagctaggtt

SEQ ID NO: 2167 - RNA, 21 nt, synthetic construct
  source 1..21: mol_type = other RNA
  modified_base 1: mod_base = OTHER; note = 2'-O-methyl-uridine-3'-phosphorothioate
  modified_base 2: mod_base = OTHER; note = 2'-deoxy-2'-fluoro-uridine-3'-phosphorothioate
  modified_base 3: mod_base = OTHER; note = 2'-O-methyl-adenosine-3'-phosphate
  modified_base 4: mod_base = OTHER; note = 2'-O-methyl-uridine-3'-phosphate
  modified_base 5: mod_base = OTHER; note = 2'-O-methyl-adenosine-3'-phosphate
  modified_base 6: mod_base = OTHER; note = 2'-deoxy-2'-fluoro-guanosine-3'-phosphate
  modified_base 7: mod_base = OTHER; note = 2'-O-methyl-uridine-3'-phosphate
  modified_base 8: mod_base = OTHER; note = 2'-deoxy-2'-fluoro-adenosine-3'-phosphate
  modified_base 9: mod_base = OTHER; note = 2'-deoxy-2'-fluoro-uridine-3'-phosphate
  modified_base 10: mod_base = OTHER; note = 2'-O-methyl-guanosine-3'-phosphate
  modified_base 11: mod_base = OTHER; note = 2'-O-methyl-guanosine-3'-phosphate
  modified_base 12: mod_base = OTHER; note = 2'-O-methyl-uridine-3'-phosphate
  modified_base 13: mod_base = OTHER; note = 2'-O-methyl-adenosine-3'-phosphate
  modified_base 14: mod_base = OTHER; note = 2'-deoxy-2'-fluoro-adenosine-3'-phosphate
  modified_base 15: mod_base = OTHER; note = 2'-O-methyl-guanosine-3'-phosphate
  modified_base 16: mod_base = OTHER; note = 2'-deoxy-2'-fluoro-cytidine-3'-phosphate
  modified_base 17: mod_base = OTHER; note = 2'-O-methyl-uridine-3'-phosphate
  modified_base 18: mod_base = OTHER; note = 2'-O-methyl-adenosine-3'-phosphate
  modified_base 19: mod_base = OTHER; note = 2'-O-methyl-guanosine-3'-phosphorothioate
  modified_base 20: mod_base = OTHER; note = 2'-O-methyl-uridine-3'-phosphorothioate
  modified_base 21: mod_base = OTHER; note = 2'-O-methyl-uridine-3'-phosphate
ttatagtatggtaagctagtt

SEQ ID NO: 2168 - RNA, 21 nt, synthetic construct
  source 1..21: mol_type = other RNA
  modified_base 1: mod_base = OTHER; note = 2'-O-methyl-uridine-3'-phosphorothioate
  modified_base 2: mod_base = OTHER; note = 2'-deoxy-2'-fluoro-guanosine-3'-phosphorothioate
  modified_base 3: mod_base = OTHER; note = 2'-O-methyl-adenosine-3'-phosphate
  modified_base 4: mod_base = OTHER; note = 2'-O-methyl-uridine-3'-phosphate
  modified_base 5: mod_base = OTHER; note = 2'-O-methyl-adenosine-3'-phosphate
  modified_base 6: mod_base = OTHER; note = 2'-deoxy-2'-fluoro-uridine-3'-phosphate
  modified_base 7: mod_base = OTHER; note = 2'-O-methyl-adenosine-3'-phosphate
  modified_base 8: mod_base = OTHER; note = 2'-deoxy-2'-fluoro-guanosine-3'-phosphate
  modified_base 9: mod_base = OTHER; note = 2'-deoxy-2'-fluoro-uridine-3'-phosphate
  modified_base 10: mod_base = OTHER; note = 2'-O-methyl-adenosine-3'-phosphate
  modified_base 11: mod_base = OTHER; note = 2'-O-methyl-uridine-3'-phosphate
  modified_base 12: mod_base = OTHER; note = 2'-O-methyl-guanosine-3'-phosphate
  modified_base 13: mod_base = OTHER; note = 2'-O-methyl-guanosine-3'-phosphate
  modified_base 14: mod_base = OTHER; note = 2'-deoxy-2'-fluoro-uridine-3'-phosphate
  modified_base 15: mod_base = OTHER; note = 2'-O-methyl-adenosine-3'-phosphate
  modified_base 16: mod_base = OTHER; note = 2'-deoxy-2'-fluoro-adenosine-3'-phosphate
  modified_base 17: mod_base = OTHER; note = 2'-O-methyl-guanosine-3'-phosphate
  modified_base 18: mod_base = OTHER; note = 2'-O-methyl-cytidine-3'-phosphate
  modified_base 19: mod_base = OTHER; note = 2'-O-methyl-uridine-3'-phosphorothioate
  modified_base 20: mod_base = OTHER; note = 2'-O-methyl-uridine-3'-phosphorothioate
  modified_base 21: mod_base = OTHER; note = 2'-O-methyl-uridine-3'-phosphate
tgatatagtatggtaagcttt

SEQ ID NO: 2169 - RNA, 21 nt, synthetic construct
  source 1..21: mol_type = other RNA
  modified_base 1: mod_base = OTHER; note = 2'-O-methyl-uridine-3'-phosphorothioate
  modified_base 2: mod_base = OTHER; note = 2'-deoxy-2'-fluoro-uridine-3'-phosphorothioate
  modified_base 3: mod_base = OTHER; note = 2'-O-methyl-uridine-3'-phosphate
  modified_base 4: mod_base = OTHER; note = 2'-O-methyl-adenosine-3'-phosphate
  modified_base 5: mod_base = OTHER; note = 2'-O-methyl-adenosine-3'-phosphate
  modified_base 6: mod_base = OTHER; note = 2'-deoxy-2'-fluoro-uridine-3'-phosphate
  modified_base 7: mod_base = OTHER; note = 2'-O-methyl-adenosine-3'-phosphate
  modified_base 8: mod_base = OTHER; note = 2'-deoxy-2'-fluoro-uridine-3'-phosphate
  modified_base 9: mod_base = OTHER; note = 2'-deoxy-2'-fluoro-uridine-3'-phosphate
  modified_base 10: mod_base = OTHER; note = 2'-O-methyl-uridine-3'-phosphate
  modified_base 11: mod_base = OTHER; note = 2'-O-methyl-guanosine-3'-phosphate
  modified_base 12: mod_base = OTHER; note = 2'-O-methyl-guanosine-3'-phosphate
  modified_base 13: mod_base = OTHER; note = 2'-O-methyl-adenosine-3'-phosphate
  modified_base 14: mod_base = OTHER; note = 2'-deoxy-2'-fluoro-guanosine-3'-phosphate
  modified_base 15: mod_base = OTHER; note = 2'-O-methyl-adenosine-3'-phosphate
  modified_base 16: mod_base = OTHER; note = 2'-deoxy-2'-fluoro-guanosine-3'-phosphate
  modified_base 17: mod_base = OTHER; note = 2'-O-methyl-adenosine-3'-phosphate
  modified_base 18: mod_base = OTHER; note = 2'-O-methyl-guanosine-3'-phosphate
  modified_base 19: mod_base = OTHER; note = 2'-O-methyl-adenosine-3'-phosphorothioate
  modified_base 20: mod_base = OTHER; note = 2'-O-methyl-uridine-3'-phosphorothioate
  modified_base 21: mod_base = OTHER; note = 2'-O-methyl-uridine-3'-phosphate
tttaatatttggagagagatt

SEQ ID NO: 2170 - RNA, 21 nt, synthetic construct
  source 1..21: mol_type = other RNA
  modified_base 1: mod_base = OTHER; note = 2'-O-methyl-uridine-3'-phosphorothioate
  modified_base 2: mod_base = OTHER; note = 2'-deoxy-2'-fluoro-adenosine-3'-phosphorothioate
  modified_base 3: mod_base = OTHER; note = 2'-O-methyl-uridine-3'-phosphate
  modified_base 4: mod_base = OTHER; note = 2'-O-methyl-guanosine-3'-phosphate
  modified_base 5: mod_base = OTHER; note = 2'-O-methyl-guanosine-3'-phosphate
  modified_base 6: mod_base = OTHER; note = 2'-deoxy-2'-fluoro-guanosine-3'-phosphate
  modified_base 7: mod_base = OTHER; note = 2'-O-methyl-cytidine-3'-phosphate
  modified_base 8: mod_base = OTHER; note = 2'-deoxy-2'-fluoro-cytidine-3'-phosphate
  modified_base 9: mod_base = OTHER; note = 2'-deoxy-2'-fluoro-adenosine-3'-phosphate
  modified_base 10: mod_base = OTHER; note = 2'-O-methyl-adenosine-3'-phosphate
  modified_base 11: mod_base = OTHER; note = 2'-O-methyl-cytidine-3'-phosphate
  modified_base 12: mod_base = OTHER; note = 2'-O-methyl-adenosine-3'-phosphate
  modified_base 13: mod_base = OTHER; note = 2'-O-methyl-adenosine-3'-phosphate
  modified_base 14: mod_base = OTHER; note = 2'-deoxy-2'-fluoro-guanosine-3'-phosphate
  modified_base 15: mod_base = OTHER; note = 2'-O-methyl-uridine-3'-phosphate
  modified_base 16: mod_base = OTHER; note = 2'-deoxy-2'-fluoro-uridine-3'-phosphate
  modified_base 17: mod_base = OTHER; note = 2'-O-methyl-cytidine-3'-phosphate
  modified_base 18: mod_base = OTHER; note = 2'-O-methyl-adenosine-3'-phosphate
  modified_base 19: mod_base = OTHER; note = 2'-O-methyl-uridine-3'-phosphorothioate
  modified_base 20: mod_base = OTHER; note = 2'-O-methyl-uridine-3'-phosphorothioate
  modified_base 21: mod_base = OTHER; note = 2'-O-methyl-uridine-3'-phosphate
tatgggccaacaagttcattt

SEQ ID NO: 2171 - RNA, 21 nt, synthetic construct
  source 1..21: mol_type = other RNA
  modified_base 1: mod_base = OTHER; note = 2'-O-methyl-uridine-3'-phosphorothioate
  modified_base 2: mod_base = OTHER; note = 2'-deoxy-2'-fluoro-guanosine-3'-phosphorothioate
  modified_base 3: mod_base = OTHER; note = 2'-O-methyl-adenosine-3'-phosphate
  modified_base 4: mod_base = OTHER; note = 2'-O-methyl-uridine-3'-phosphate
  modified_base 5: mod_base = OTHER; note = 2'-O-methyl-guanosine-3'-phosphate
  modified_base 6: mod_base = OTHER; note = 2'-deoxy-2'-fluoro-guanosine-3'-phosphate
  modified_base 7: mod_base = OTHER; note = 2'-O-methyl-guanosine-3'-phosphate
  modified_base 8: mod_base = OTHER; note = 2'-deoxy-2'-fluoro-cytidine-3'-phosphate
  modified_base 9: mod_base = OTHER; note = 2'-deoxy-2'-fluoro-cytidine-3'-phosphate
  modified_base 10: mod_base = OTHER; note = 2'-O-methyl-adenosine-3'-phosphate
  modified_base 11: mod_base = OTHER; note = 2'-O-methyl-adenosine-3'-phosphate
  modified_base 12: mod_base = OTHER; note = 2'-O-methyl-cytidine-3'-phosphate
  modified_base 13: mod_base = OTHER; note = 2'-O-methyl-adenosine-3'-phosphate
  modified_base 14: mod_base = OTHER; note = 2'-deoxy-2'-fluoro-adenosine-3'-phosphate
  modified_base 15: mod_base = OTHER; note = 2'-O-methyl-guanosine-3'-phosphate
  modified_base 16: mod_base = OTHER; note = 2'-deoxy-2'-fluoro-uridine-3'-phosphate
  modified_base 17: mod_base = OTHER; note = 2'-O-methyl-uridine-3'-phosphate
  modified_base 18: mod_base = OTHER; note = 2'-O-methyl-cytidine-3'-phosphate
  modified_base 19: mod_base = OTHER; note = 2'-O-methyl-adenosine-3'-phosphorothioate
  modified_base 20: mod_base = OTHER; note = 2'-O-methyl-uridine-3'-phosphorothioate
  modified_base 21: mod_base = OTHER; note = 2'-O-methyl-uridine-3'-phosphate
tgatgggccaacaagttcatt

SEQ ID NO: 2172 - RNA, 21 nt, synthetic construct
  source 1..21: mol_type = other RNA
  modified_base 1: mod_base = OTHER; note = 2'-O-methyl-uridine-3'-phosphorothioate
  modified_base 2: mod_base = OTHER; note = 2'-deoxy-2'-fluoro-adenosine-3'-phosphorothioate
  modified_base 3: mod_base = OTHER; note = 2'-O-methyl-guanosine-3'-phosphate
  modified_base 4: mod_base = OTHER; note = 2'-O-methyl-adenosine-3'-phosphate
  modified_base 5: mod_base = OTHER; note = 2'-O-methyl-uridine-3'-phosphate
  modified_base 6: mod_base = OTHER; note = 2'-deoxy-2'-fluoro-guanosine-3'-phosphate
  modified_base 7: mod_base = OTHER; note = 2'-O-methyl-guanosine-3'-phosphate
  modified_base 8: mod_base = OTHER; note = 2'-deoxy-2'-fluoro-guanosine-3'-phosphate
  modified_base 9: mod_base = OTHER; note = 2'-deoxy-2'-fluoro-cytidine-3'-phosphate
  modified_base 10: mod_base = OTHER; note = 2'-O-methyl-cytidine-3'-phosphate
  modified_base 11: mod_base = OTHER; note = 2'-O-methyl-adenosine-3'-phosphate
  modified_base 12: mod_base = OTHER; note = 2'-O-methyl-adenosine-3'-phosphate
  modified_base 13: mod_base = OTHER; note = 2'-O-methyl-cytidine-3'-phosphate
  modified_base 14: mod_base = OTHER; note = 2'-deoxy-2'-fluoro-adenosine-3'-phosphate
  modified_base 15: mod_base = OTHER; note = 2'-O-methyl-adenosine-3'-phosphate
  modified_base 16: mod_base = OTHER; note = 2'-deoxy-2'-fluoro-guanosine-3'-phosphate
  modified_base 17: mod_base = OTHER; note = 2'-O-methyl-uridine-3'-phosphate
  modified_base 18: mod_base = OTHER; note = 2'-O-methyl-uridine-3'-phosphate
  modified_base 19: mod_base = OTHER; note = 2'-O-methyl-cytidine-3'-phosphorothioate
  modified_base 20: mod_base = OTHER; note = 2'-O-methyl-uridine-3'-phosphorothioate
  modified_base 21: mod_base = OTHER; note = 2'-O-methyl-uridine-3'-phosphate
tagatgggccaacaagttctt

SEQ ID NO: 2173 - RNA, 21 nt, synthetic construct
  source 1..21: mol_type = other RNA
  modified_base 1: mod_base = OTHER; note = 2'-O-methyl-uridine-3'-phosphorothioate
  modified_base 2: mod_base = OTHER; note = 2'-deoxy-2'-fluoro-uridine-3'-phosphorothioate
  modified_base 3: mod_base = OTHER; note = 2'-O-methyl-adenosine-3'-phosphate
  modified_base 4: mod_base = OTHER; note = 2'-O-methyl-guanosine-3'-phosphate
  modified_base 5: mod_base = OTHER; note = 2'-O-methyl-adenosine-3'-phosphate
  modified_base 6: mod_base = OTHER; note = 2'-deoxy-2'-fluoro-uridine-3'-phosphate
  modified_base 7: mod_base = OTHER; note = 2'-O-methyl-guanosine-3'-phosphate
  modified_base 8: mod_base = OTHER; note = 2'-deoxy-2'-fluoro-guanosine-3'-phosphate
  modified_base 9: mod_base = OTHER; note = 2'-deoxy-2'-fluoro-guanosine-3'-phosphate
  modified_base 10: mod_base = OTHER; note = 2'-O-methyl-cytidine-3'-phosphate
  modified_base 11: mod_base = OTHER; note = 2'-O-methyl-cytidine-3'-phosphate
  modified_base 12: mod_base = OTHER; note = 2'-O-methyl-adenosine-3'-phosphate
  modified_base 13: mod_base = OTHER; note = 2'-O-methyl-adenosine-3'-phosphate
  modified_base 14: mod_base = OTHER; note = 2'-deoxy-2'-fluoro-cytidine-3'-phosphate
  modified_base 15: mod_base = OTHER; note = 2'-O-methyl-adenosine-3'-phosphate
  modified_base 16: mod_base = OTHER; note = 2'-deoxy-2'-fluoro-adenosine-3'-phosphate
  modified_base 17: mod_base = OTHER; note = 2'-O-methyl-guanosine-3'-phosphate
  modified_base 18: mod_base = OTHER; note = 2'-O-methyl-uridine-3'-phosphate
  modified_base 19: mod_base = OTHER; note = 2'-O-methyl-uridine-3'-phosphorothioate
  modified_base 20: mod_base = OTHER; note = 2'-O-methyl-uridine-3'-phosphorothioate
  modified_base 21: mod_base = OTHER; note = 2'-O-methyl-uridine-3'-phosphate
ttagatgggccaacaagtttt

SEQ ID NO: 2174 - RNA, 21 nt, synthetic construct
  source 1..21: mol_type = other RNA
  modified_base 1: mod_base = OTHER; note = 2'-O-methyl-uridine-3'-phosphorothioate
  modified_base 2: mod_base = OTHER; note = 2'-deoxy-2'-fluoro-adenosine-3'-phosphorothioate
  modified_base 3: mod_base = OTHER; note = 2'-O-methyl-adenosine-3'-phosphate
  modified_base 4: mod_base = OTHER; note = 2'-O-methyl-uridine-3'-phosphate
  modified_base 5: mod_base = OTHER; note = 2'-O-methyl-adenosine-3'-phosphate
  modified_base 6: mod_base = OTHER; note = 2'-deoxy-2'-fluoro-guanosine-3'-phosphate
  modified_base 7: mod_base = OTHER; note = 2'-O-methyl-adenosine-3'-phosphate
  modified_base 8: mod_base = OTHER; note = 2'-deoxy-2'-fluoro-uridine-3'-phosphate
  modified_base 9: mod_base = OTHER; note = 2'-deoxy-2'-fluoro-guanosine-3'-phosphate
  modified_base 10: mod_base = OTHER; note = 2'-O-methyl-guanosine-3'-phosphate
  modified_base 11: mod_base = OTHER; note = 2'-O-methyl-guanosine-3'-phosphate
  modified_base 12: mod_base = OTHER; note = 2'-O-methyl-cytidine-3'-phosphate
  modified_base 13: mod_base = OTHER; note = 2'-O-methyl-cytidine-3'-phosphate
  modified_base 14: mod_base = OTHER; note = 2'-deoxy-2'-fluoro-adenosine-3'-phosphate
  modified_base 15: mod_base = OTHER; note = 2'-O-methyl-adenosine-3'-phosphate
  modified_base 16: mod_base = OTHER; note = 2'-deoxy-2'-fluoro-cytidine-3'-phosphate
  modified_base 17: mod_base = OTHER; note = 2'-O-methyl-adenosine-3'-phosphate
  modified_base 18: mod_base = OTHER; note = 2'-O-methyl-adenosine-3'-phosphate
  modified_base 19: mod_base = OTHER; note = 2'-O-methyl-guanosine-3'-phosphorothioate
  modified_base 20: mod_base = OTHER; note = 2'-O-methyl-uridine-3'-phosphorothioate
  modified_base 21: mod_base = OTHER; note = 2'-O-methyl-uridine-3'-phosphate
taatagatgggccaacaagtt

SEQ ID NO: 2175 - RNA, 21 nt, synthetic construct
  source 1..21: mol_type = other RNA
  modified_base 1: mod_base = OTHER; note = 2'-O-methyl-uridine-3'-phosphorothioate
  modified_base 2: mod_base = OTHER; note = 2'-deoxy-2'-fluoro-guanosine-3'-phosphorothioate
  modified_base 3: mod_base = OTHER; note = 2'-O-methyl-uridine-3'-phosphate
  modified_base 4: mod_base = OTHER; note = 2'-O-methyl-adenosine-3'-phosphate
  modified_base 5: mod_base = OTHER; note = 2'-O-methyl-adenosine-3'-phosphate
  modified_base 6: mod_base = OTHER; note = 2'-deoxy-2'-fluoro-uridine-3'-phosphate
  modified_base 7: mod_base = OTHER; note = 2'-O-methyl-adenosine-3'-phosphate
  modified_base 8: mod_base = OTHER; note = 2'-deoxy-2'-fluoro-guanosine-3'-phosphate
  modified_base 9: mod_base = OTHER; note = 2'-deoxy-2'-fluoro-adenosine-3'-phosphate
  modified_base 10: mod_base = OTHER; note = 2'-O-methyl-uridine-3'-phosphate
  modified_base 11: mod_base = OTHER; note = 2'-O-methyl-guanosine-3'-phosphate
  modified_base 12: mod_base = OTHER; note = 2'-O-methyl-guanosine-3'-phosphate
  modified_base 13: mod_base = OTHER; note = 2'-O-methyl-guanosine-3'-phosphate
  modified_base 14: mod_base = OTHER; note = 2'-deoxy-2'-fluoro-cytidine-3'-phosphate
  modified_base 15: mod_base = OTHER; note = 2'-O-methyl-cytidine-3'-phosphate
  modified_base 16: mod_base = OTHER; note = 2'-deoxy-2'-fluoro-adenosine-3'-phosphate
  modified_base 17: mod_base = OTHER; note = 2'-O-methyl-adenosine-3'-phosphate
  modified_base 18: mod_base = OTHER; note = 2'-O-methyl-cytidine-3'-phosphate
  modified_base 19: mod_base = OTHER; note = 2'-O-methyl-adenosine-3'-phosphorothioate
  modified_base 20: mod_base = OTHER; note = 2'-O-methyl-uridine-3'-phosphorothioate
  modified_base 21: mod_base = OTHER; note = 2'-O-methyl-uridine-3'-phosphate
tgtaatagatgggccaacatt

SEQ ID NO: 2176 - RNA, 21 nt, synthetic construct
  source 1..21: mol_type = other RNA
  modified_base 1: mod_base = OTHER; note = 2'-O-methyl-uridine-3'-phosphorothioate
  modified_base 2: mod_base = OTHER; note = 2'-deoxy-2'-fluoro-uridine-3'-phosphorothioate
  modified_base 3: mod_base = OTHER; note = 2'-O-methyl-adenosine-3'-phosphate
  modified_base 4: mod_base = OTHER; note = 2'-O-methyl-guanosine-3'-phosphate
  modified_base 5: mod_base = OTHER; note = 2'-O-methyl-cytidine-3'-phosphate
  modified_base 6: mod_base = OTHER; note = 2'-deoxy-2'-fluoro-adenosine-3'-phosphate
  modified_base 7: mod_base = OTHER; note = 2'-O-methyl-uridine-3'-phosphate
  modified_base 8: mod_base = OTHER; note = 2'-deoxy-2'-fluoro-adenosine-3'-phosphate
  modified_base 9: mod_base = OTHER; note = 2'-deoxy-2'-fluoro-guanosine-3'-phosphate
  modified_base 10: mod_base = OTHER; note = 2'-O-methyl-cytidine-3'-phosphate
  modified_base 11: mod_base = OTHER; note = 2'-O-methyl-uridine-3'-phosphate
  modified_base 12: mod_base = OTHER; note = 2'-O-methyl-guanosine-3'-phosphate
  modified_base 13: mod_base = OTHER; note = 2'-O-methyl-guanosine-3'-phosphate
  modified_base 14: mod_base = OTHER; note = 2'-deoxy-2'-fluoro-adenosine-3'-phosphate
  modified_base 15: mod_base = OTHER; note = 2'-O-methyl-uridine-3'-phosphate
  modified_base 16: mod_base = OTHER; note = 2'-deoxy-2'-fluoro-cytidine-3'-phosphate
  modified_base 17: mod_base = OTHER; note = 2'-O-methyl-uridine-3'-phosphate
  modified_base 18: mod_base = OTHER; note = 2'-O-methyl-adenosine-3'-phosphate
  modified_base 19: mod_base = OTHER; note = 2'-O-methyl-uridine-3'-phosphorothioate
  modified_base 20: mod_base = OTHER; note = 2'-O-methyl-uridine-3'-phosphorothioate
  modified_base 21: mod_base = OTHER; note = 2'-O-methyl-uridine-3'-phosphate
ttagcatagctggatctattt

SEQ ID NO: 2177 - RNA, 21 nt, synthetic construct
  source 1..21: mol_type = other RNA
  modified_base 1: mod_base = OTHER; note = 2'-O-methyl-uridine-3'-phosphorothioate
  modified_base 2: mod_base = OTHER; note = 2'-deoxy-2'-fluoro-adenosine-3'-phosphorothioate
  modified_base 3: mod_base = OTHER; note = 2'-O-methyl-uridine-3'-phosphate
  modified_base 4: mod_base = OTHER; note = 2'-O-methyl-adenosine-3'-phosphate
  modified_base 5: mod_base = OTHER; note = 2'-O-methyl-guanosine-3'-phosphate
  modified_base 6: mod_base = OTHER; note = 2'-deoxy-2'-fluoro-cytidine-3'-phosphate
  modified_base 7: mod_base = OTHER; note = 2'-O-methyl-adenosine-3'-phosphate
  modified_base 8: mod_base = OTHER; note = 2'-deoxy-2'-fluoro-uridine-3'-phosphate
  modified_base 9: mod_base = OTHER; note = 2'-deoxy-2'-fluoro-adenosine-3'-phosphate
  modified_base 10: mod_base = OTHER; note = 2'-O-methyl-guanosine-3'-phosphate
  modified_base 11: mod_base = OTHER; note = 2'-O-methyl-cytidine-3'-phosphate
  modified_base 12: mod_base = OTHER; note = 2'-O-methyl-uridine-3'-phosphate
  modified_base 13: mod_base = OTHER; note = 2'-O-methyl-guanosine-3'-phosphate
  modified_base 14: mod_base = OTHER; note = 2'-deoxy-2'-fluoro-guanosine-3'-phosphate
  modified_base 15: mod_base = OTHER; note = 2'-O-methyl-adenosine-3'-phosphate
  modified_base 16: mod_base = OTHER; note = 2'-deoxy-2'-fluoro-uridine-3'-phosphate
  modified_base 17: mod_base = OTHER; note = 2'-O-methyl-cytidine-3'-phosphate
  modified_base 18: mod_base = OTHER; note = 2'-O-methyl-uridine-3'-phosphate
  modified_base 19: mod_base = OTHER; note = 2'-O-methyl-adenosine-3'-phosphorothioate
  modified_base 20: mod_base = OTHER; note = 2'-O-methyl-uridine-3'-phosphorothioate
  modified_base 21: mod_base = OTHER; note = 2'-O-methyl-uridine-3'-phosphate
tatagcatagctggatctatt

SEQ ID NO: 2178 - RNA, 21 nt, synthetic construct
  source 1..21: mol_type = other RNA
  modified_base 1: mod_base = OTHER; note = 2'-O-methyl-uridine-3'-phosphorothioate
  modified_base 2: mod_base = OTHER; note = 2'-deoxy-2'-fluoro-adenosine-3'-phosphorothioate
  modified_base 3: mod_base = OTHER; note = 2'-O-methyl-adenosine-3'-phosphate
  modified_base 4: mod_base = OTHER; note = 2'-O-methyl-uridine-3'-phosphate
  modified_base 5: mod_base = OTHER; note = 2'-O-methyl-adenosine-3'-phosphate
  modified_base 6: mod_base = OTHER; note = 2'-deoxy-2'-fluoro-guanosine-3'-phosphate
  modified_base 7: mod_base = OTHER; note = 2'-O-methyl-cytidine-3'-phosphate
  modified_base 8: mod_base = OTHER; note = 2'-deoxy-2'-fluoro-adenosine-3'-phosphate
  modified_base 9: mod_base = OTHER; note = 2'-deoxy-2'-fluoro-uridine-3'-phosphate
  modified_base 10: mod_base = OTHER; note = 2'-O-methyl-adenosine-3'-phosphate
  modified_base 11: mod_base = OTHER; note = 2'-O-methyl-guanosine-3'-phosphate
  modified_base 12: mod_base = OTHER; note = 2'-O-methyl-cytidine-3'-phosphate
  modified_base 13: mod_base = OTHER; note = 2'-O-methyl-uridine-3'-phosphate
  modified_base 14: mod_base = OTHER; note = 2'-deoxy-2'-fluoro-guanosine-3'-phosphate
  modified_base 15: mod_base = OTHER; note = 2'-O-methyl-guanosine-3'-phosphate
  modified_base 16: mod_base = OTHER; note = 2'-deoxy-2'-fluoro-adenosine-3'-phosphate
  modified_base 17: mod_base = OTHER; note = 2'-O-methyl-uridine-3'-phosphate
  modified_base 18: mod_base = OTHER; note = 2'-O-methyl-cytidine-3'-phosphate
  modified_base 19: mod_base = OTHER; note = 2'-O-methyl-uridine-3'-phosphorothioate
  modified_base 20: mod_base = OTHER; note = 2'-O-methyl-uridine-3'-phosphorothioate
  modified_base 21: mod_base = OTHER; note = 2'-O-methyl-uridine-3'-phosphate
taatagcatagctggatcttt

SEQ ID NO: 2179 - RNA, 21 nt, synthetic construct
  source 1..21: mol_type = other RNA
  modified_base 1: mod_base = OTHER; note = 2'-O-methyl-uridine-3'-phosphorothioate
  modified_base 2: mod_base = OTHER; note = 2'-deoxy-2'-fluoro-uridine-3'-phosphorothioate
  modified_base 3: mod_base = OTHER; note = 2'-O-methyl-adenosine-3'-phosphate
  modified_base 4: mod_base = OTHER; note = 2'-O-methyl-uridine-3'-phosphate
  modified_base 5: mod_base = OTHER; note = 2'-O-methyl-uridine-3'-phosphate
  modified_base 6: mod_base = OTHER; note = 2'-deoxy-2'-fluoro-guanosine-3'-phosphate
  modified_base 7: mod_base = OTHER; note = 2'-O-methyl-guanosine-3'-phosphate
  modified_base 8: mod_base = OTHER; note = 2'-deoxy-2'-fluoro-adenosine-3'-phosphate
  modified_base 9: mod_base = OTHER; note = 2'-deoxy-2'-fluoro-adenosine-3'-phosphate
  modified_base 10: mod_base = OTHER; note = 2'-O-methyl-guanosine-3'-phosphate
  modified_base 11: mod_base = OTHER; note = 2'-O-methyl-adenosine-3'-phosphate
  modified_base 12: mod_base = OTHER; note = 2'-O-methyl-uridine-3'-phosphate
  modified_base 13: mod_base = OTHER; note = 2'-O-methyl-guanosine-3'-phosphate
  modified_base 14: mod_base = OTHER; note = 2'-deoxy-2'-fluoro-uridine-3'-phosphate
  modified_base 15: mod_base = OTHER; note = 2'-O-methyl-uridine-3'-phosphate
  modified_base 16: mod_base = OTHER; note = 2'-deoxy-2'-fluoro-cytidine-3'-phosphate
  modified_base 17: mod_base = OTHER; note = 2'-O-methyl-uridine-3'-phosphate
  modified_base 18: mod_base = OTHER; note = 2'-O-methyl-guanosine-3'-phosphate
  modified_base 19: mod_base = OTHER; note = 2'-O-methyl-adenosine-3'-phosphorothioate
  modified_base 20: mod_base = OTHER; note = 2'-O-methyl-uridine-3'-phosphorothioate
  modified_base 21: mod_base = OTHER; note = 2'-O-methyl-uridine-3'-phosphate
ttattggaagatgttctgatt

SEQ ID NO: 2180 - RNA, 21 nt, synthetic construct
  source 1..21: mol_type = other RNA
  modified_base 1: mod_base = OTHER; note = 2'-O-methyl-uridine-3'-phosphorothioate
  modified_base 2: mod_base = OTHER; note = 2'-deoxy-2'-fluoro-uridine-3'-phosphorothioate
  modified_base 3: mod_base = OTHER; note = 2'-O-methyl-guanosine-3'-phosphate
  modified_base 4: mod_base = OTHER; note = 2'-O-methyl-adenosine-3'-phosphate
  modified_base 5: mod_base = OTHER; note = 2'-O-methyl-guanosine-3'-phosphate
  modified_base 6: mod_base = OTHER; note = 2'-deoxy-2'-fluoro-uridine-3'-phosphate
  modified_base 7: mod_base = OTHER; note = 2'-O-methyl-uridine-3'-phosphate
  modified_base 8: mod_base = OTHER; note = 2'-deoxy-2'-fluoro-adenosine-3'-phosphate
  modified_base 9: mod_base = OTHER; note = 2'-deoxy-2'-fluoro-uridine-3'-phosphate
  modified_base 10: mod_base = OTHER; note = 2'-O-methyl-uridine-3'-phosphate
  modified_base 11: mod_base = OTHER; note = 2'-O-methyl-guanosine-3'-phosphate
  modified_base 12: mod_base = OTHER; note = 2'-O-methyl-guanosine-3'-phosphate
  modified_base 13: mod_base = OTHER; note = 2'-O-methyl-adenosine-3'-phosphate
  modified_base 14: mod_base = OTHER; note = 2'-deoxy-2'-fluoro-adenosine-3'-phosphate
  modified_base 15: mod_base = OTHER; note = 2'-O-methyl-guanosine-3'-phosphate
  modified_base 16: mod_base = OTHER; note = 2'-deoxy-2'-fluoro-adenosine-3'-phosphate
  modified_base 17: mod_base = OTHER; note = 2'-O-methyl-uridine-3'-phosphate
  modified_base 18: mod_base = OTHER; note = 2'-O-methyl-guanosine-3'-phosphate
  modified_base 19: mod_base = OTHER; note = 2'-O-methyl-uridine-3'-phosphorothioate
  modified_base 20: mod_base = OTHER; note = 2'-O-methyl-uridine-3'-phosphorothioate
  modified_base 21: mod_base = OTHER; note = 2'-O-methyl-uridine-3'-phosphate
ttgagttattggaagatgttt

SEQ ID NO: 2181 - RNA, 21 nt, synthetic construct
  source 1..21: mol_type = other RNA
  modified_base 1: mod_base = OTHER; note = 2'-O-methyl-uridine-3'-phosphorothioate
  modified_base 2: mod_base = OTHER; note = 2'-deoxy-2'-fluoro-adenosine-3'-phosphorothioate
  modified_base 3: mod_base = OTHER; note = 2'-O-methyl-uridine-3'-phosphate
  modified_base 4: mod_base = OTHER; note = 2'-O-methyl-uridine-3'-phosphate
  modified_base 5: mod_base = OTHER; note = 2'-O-methyl-adenosine-3'-phosphate
  modified_base 6: mod_base = OTHER; note = 2'-deoxy-2'-fluoro-cytidine-3'-phosphate
  modified_base 7: mod_base = OTHER; note = 2'-O-methyl-cytidine-3'-phosphate
  modified_base 8: mod_base = OTHER; note = 2'-deoxy-2'-fluoro-adenosine-3'-phosphate
  modified_base 9: mod_base = OTHER; note = 2'-deoxy-2'-fluoro-adenosine-3'-phosphate
  modified_base 10: mod_base = OTHER; note = 2'-O-methyl-adenosine-3'-phosphate
  modified_base 11: mod_base = OTHER; note = 2'-O-methyl-guanosine-3'-phosphate
  modified_base 12: mod_base = OTHER; note = 2'-O-methyl-uridine-3'-phosphate
  modified_base 13: mod_base = OTHER; note = 2'-O-methyl-uridine-3'-phosphate
  modified_base 14: mod_base = OTHER; note = 2'-deoxy-2'-fluoro-uridine-3'-phosphate
  modified_base 15: mod_base = OTHER; note = 2'-O-methyl-guanosine-3'-phosphate
  modified_base 16: mod_base = OTHER; note = 2'-deoxy-2'-fluoro-guanosine-3'-phosphate
  modified_base 17: mod_base = OTHER; note = 2'-O-methyl-uridine-3'-phosphate
  modified_base 18: mod_base = OTHER; note = 2'-O-methyl-guanosine-3'-phosphate
  modified_base 19: mod_base = OTHER; note = 2'-O-methyl-adenosine-3'-phosphorothioate
  modified_base 20: mod_base = OTHER; note = 2'-O-methyl-uridine-3'-phosphorothioate
  modified_base 21: mod_base = OTHER; note = 2'-O-methyl-uridine-3'-phosphate
tattaccaaagtttggtgatt

SEQ ID NO: 2182 - RNA, 21 nt, synthetic construct
  source 1..21: mol_type = other RNA
  modified_base 1: mod_base = OTHER; note = 2'-O-methyl-uridine-3'-phosphorothioate
  modified_base 2: mod_base = OTHER; note = 2'-deoxy-2'-fluoro-adenosine-3'-phosphorothioate
  modified_base 3: mod_base = OTHER; note = 2'-O-methyl-adenosine-3'-phosphate
  modified_base 4: mod_base = OTHER; note = 2'-O-methyl-uridine-3'-phosphate
  modified_base 5: mod_base = OTHER; note = 2'-O-methyl-uridine-3'-phosphate
  modified_base 6: mod_base = OTHER; note = 2'-deoxy-2'-fluoro-adenosine-3'-phosphate
  modified_base 7: mod_base = OTHER; note = 2'-O-methyl-cytidine-3'-phosphate
  modified_base 8: mod_base = OTHER; note = 2'-deoxy-2'-fluoro-cytidine-3'-phosphate
  modified_base 9: mod_base = OTHER; note = 2'-deoxy-2'-fluoro-adenosine-3'-phosphate
  modified_base 10: mod_base = OTHER; note = 2'-O-methyl-adenosine-3'-phosphate
  modified_base 11: mod_base = OTHER; note = 2'-O-methyl-adenosine-3'-phosphate
  modified_base 12: mod_base = OTHER; note = 2'-O-methyl-guanosine-3'-phosphate
  modified_base 13: mod_base = OTHER; note = 2'-O-methyl-uridine-3'-phosphate
  modified_base 14: mod_base = OTHER; note = 2'-deoxy-2'-fluoro-uridine-3'-phosphate
  modified_base 15: mod_base = OTHER; note = 2'-O-methyl-uridine-3'-phosphate
  modified_base 16: mod_base = OTHER; note = 2'-deoxy-2'-fluoro-guanosine-3'-phosphate
  modified_base 17: mod_base = OTHER; note = 2'-O-methyl-guanosine-3'-phosphate
  modified_base 18: mod_base = OTHER; note = 2'-O-methyl-uridine-3'-phosphate
  modified_base 19: mod_base = OTHER; note = 2'-O-methyl-guanosine-3'-phosphorothioate
  modified_base 20: mod_base = OTHER; note = 2'-O-methyl-uridine-3'-phosphorothioate
  modified_base 21: mod_base = OTHER; note = 2'-O-methyl-uridine-3'-phosphate
taattaccaaagtttggtgtt

SEQ ID NO: 2183 - RNA, 21 nt, synthetic construct
  source 1..21: mol_type = other RNA
  modified_base 1: mod_base = OTHER; note = 2'-O-methyl-uridine-3'-phosphorothioate
  modified_base 2: mod_base = OTHER; note = 2'-deoxy-2'-fluoro-adenosine-3'-phosphorothioate
  modified_base 3: mod_base = OTHER; note = 2'-O-methyl-adenosine-3'-phosphate
  modified_base 4: mod_base = OTHER; note = 2'-O-methyl-cytidine-3'-phosphate
  modified_base 5: mod_base = OTHER; note = 2'-O-methyl-uridine-3'-phosphate
  modified_base 6: mod_base = OTHER; note = 2'-deoxy-2'-fluoro-uridine-3'-phosphate
  modified_base 7: mod_base = OTHER; note = 2'-O-methyl-adenosine-3'-phosphate
  modified_base 8: mod_base = OTHER; note = 2'-deoxy-2'-fluoro-adenosine-3'-phosphate
  modified_base 9: mod_base = OTHER; note = 2'-deoxy-2'-fluoro-adenosine-3'-phosphate
  modified_base 10: mod_base = OTHER; note = 2'-O-methyl-uridine-3'-phosphate
  modified_base 11: mod_base = OTHER; note = 2'-O-methyl-uridine-3'-phosphate
  modified_base 12: mod_base = OTHER; note = 2'-O-methyl-adenosine-3'-phosphate
  modified_base 13: mod_base = OTHER; note = 2'-O-methyl-cytidine-3'-phosphate
  modified_base 14: mod_base = OTHER; note = 2'-deoxy-2'-fluoro-cytidine-3'-phosphate
  modified_base 15: mod_base = OTHER; note = 2'-O-methyl-adenosine-3'-phosphate
  modified_base 16: mod_base = OTHER; note = 2'-deoxy-2'-fluoro-adenosine-3'-phosphate
  modified_base 17: mod_base = OTHER; note = 2'-O-methyl-adenosine-3'-phosphate
  modified_base 18: mod_base = OTHER; note = 2'-O-methyl-guanosine-3'-phosphate
  modified_base 19: mod_base = OTHER; note = 2'-O-methyl-uridine-3'-phosphorothioate
  modified_base 20: mod_base = OTHER; note = 2'-O-methyl-uridine-3'-phosphorothioate
  modified_base 21: mod_base = OTHER; note = 2'-O-methyl-uridine-3'-phosphate
taacttaaattaccaaagttt

SEQ ID NO: 2184 - RNA, 21 nt, synthetic construct
  source 1..21: mol_type = other RNA
  modified_base 1: mod_base = OTHER; note = 2'-O-methyl-uridine-3'-phosphorothioate
  modified_base 2: mod_base = OTHER; note = 2'-deoxy-2'-fluoro-uridine-3'-phosphorothioate
  modified_base 3: mod_base = OTHER; note = 2'-O-methyl-adenosine-3'-phosphate
  modified_base 4: mod_base = OTHER; note = 2'-O-methyl-guanosine-3'-phosphate
  modified_base 5: mod_base = OTHER; note = 2'-O-methyl-uridine-3'-phosphate
  modified_base 6: mod_base = OTHER; note = 2'-deoxy-2'-fluoro-cytidine-3'-phosphate
  modified_base 7: mod_base = OTHER; note = 2'-O-methyl-adenosine-3'-phosphate
  modified_base 8: mod_base = OTHER; note = 2'-deoxy-2'-fluoro-adenosine-3'-phosphate
  modified_base 9: mod_base = OTHER; note = 2'-deoxy-2'-fluoro-cytidine-3'-phosphate
  modified_base 10: mod_base = OTHER; note = 2'-O-methyl-uridine-3'-phosphate
  modified_base 11: mod_base = OTHER; note = 2'-O-methyl-uridine-3'-phosphate
  modified_base 12: mod_base = OTHER; note = 2'-O-methyl-adenosine-3'-phosphate
  modified_base 13: mod_base = OTHER; note = 2'-O-methyl-adenosine-3'-phosphate
  modified_base 14: mod_base = OTHER; note = 2'-deoxy-2'-fluoro-adenosine-3'-phosphate
  modified_base 15: mod_base = OTHER; note = 2'-O-methyl-uridine-3'-phosphate
  modified_base 16: mod_base = OTHER; note = 2'-deoxy-2'-fluoro-uridine-3'-phosphate
  modified_base 17: mod_base = OTHER; note = 2'-O-methyl-adenosine-3'-phosphate
  modified_base 18: mod_base = OTHER; note = 2'-O-methyl-cytidine-3'-phosphate
  modified_base 19: mod_base = OTHER; note = 2'-O-methyl-cytidine-3'-phosphorothioate
  modified_base 20: mod_base = OTHER; note = 2'-O-methyl-uridine-3'-phosphorothioate
  modified_base 21: mod_base = OTHER; note = 2'-O-methyl-uridine-3'-phosphate
ttagtcaacttaaattacctt

SEQ ID NO: 2185 - RNA, 21 nt, synthetic construct
  source 1..21: mol_type = other RNA
  modified_base 1: mod_base = OTHER; note = 2'-O-methyl-uridine-3'-phosphorothioate
  modified_base 2: mod_base = OTHER; note = 2'-deoxy-2'-fluoro-adenosine-3'-phosphorothioate
  modified_base 3: mod_base = OTHER; note = 2'-O-methyl-uridine-3'-phosphate
  modified_base 4: mod_base = OTHER; note = 2'-O-methyl-uridine-3'-phosphate
  modified_base 5: mod_base = OTHER; note = 2'-O-methyl-adenosine-3'-phosphate
  modified_base 6: mod_base = OTHER; note = 2'-deoxy-2'-fluoro-uridine-3'-phosphate
  modified_base 7: mod_base = OTHER; note = 2'-O-methyl-guanosine-3'-phosphate
  modified_base 8: mod_base = OTHER; note = 2'-deoxy-2'-fluoro-cytidine-3'-phosphate
  modified_base 9: mod_base = OTHER; note = 2'-deoxy-2'-fluoro-adenosine-3'-phosphate
  modified_base 10: mod_base = OTHER; note = 2'-O-methyl-guanosine-3'-phosphate
  modified_base 11: mod_base = OTHER; note = 2'-O-methyl-uridine-3'-phosphate
  modified_base 12: mod_base = OTHER; note = 2'-O-methyl-adenosine-3'-phosphate
  modified_base 13: mod_base = OTHER; note = 2'-O-methyl-uridine-3'-phosphate
  modified_base 14: mod_base = OTHER; note = 2'-deoxy-2'-fluoro-adenosine-3'-phosphate
  modified_base 15: mod_base = OTHER; note = 2'-O-methyl-guanosine-3'-phosphate
  modified_base 16: mod_base = OTHER; note = 2'-deoxy-2'-fluoro-guanosine-3'-phosphate
  modified_base 17: mod_base = OTHER; note = 2'-O-methyl-uridine-3'-phosphate
  modified_base 18: mod_base = OTHER; note = 2'-O-methyl-guanosine-3'-phosphate
  modified_base 19: mod_base = OTHER; note = 2'-O-methyl-uridine-3'-phosphorothioate
  modified_base 20: mod_base = OTHER; note = 2'-O-methyl-uridine-3'-phosphorothioate
  modified_base 21: mod_base = OTHER; note = 2'-O-methyl-uridine-3'-phosphate
tattatgcagtataggtgttt

SEQ ID NO: 2186 - RNA, 21 nt, synthetic construct
  source 1..21: mol_type = other RNA
  modified_base 1: mod_base = OTHER; note = 2'-O-methyl-uridine-3'-phosphorothioate
  modified_base 2: mod_base = OTHER; note = 2'-deoxy-2'-fluoro-guanosine-3'-phosphorothioate
  modified_base 3: mod_base = OTHER; note = 2'-O-methyl-adenosine-3'-phosphate
  modified_base 4: mod_base = OTHER; note = 2'-O-methyl-uridine-3'-phosphate
  modified_base 5: mod_base = OTHER; note = 2'-O-methyl-uridine-3'-phosphate
  modified_base 6: mod_base = OTHER; note = 2'-deoxy-2'-fluoro-adenosine-3'-phosphate
  modified_base 7: mod_base = OTHER; note = 2'-O-methyl-uridine-3'-phosphate
  modified_base 8: mod_base = OTHER; note = 2'-deoxy-2'-fluoro-guanosine-3'-phosphate
  modified_base 9: mod_base = OTHER; note = 2'-deoxy-2'-fluoro-cytidine-3'-phosphate
  modified_base 10: mod_base = OTHER; note = 2'-O-methyl-adenosine-3'-phosphate
  modified_base 11: mod_base = OTHER; note = 2'-O-methyl-guanosine-3'-phosphate
  modified_base 12: mod_base = OTHER; note = 2'-O-methyl-uridine-3'-phosphate
  modified_base 13: mod_base = OTHER; note = 2'-O-methyl-adenosine-3'-phosphate
  modified_base 14: mod_base = OTHER; note = 2'-deoxy-2'-fluoro-uridine-3'-phosphate
  modified_base 15: mod_base = OTHER; note = 2'-O-methyl-adenosine-3'-phosphate
  modified_base 16: mod_base = OTHER; note = 2'-deoxy-2'-fluoro-guanosine-3'-phosphate
  modified_base 17: mod_base = OTHER; note = 2'-O-methyl-guanosine-3'-phosphate
  modified_base 18: mod_base = OTHER; note = 2'-O-methyl-uridine-3'-phosphate
  modified_base 19: mod_base = OTHER; note = 2'-O-methyl-guanosine-3'-phosphorothioate
  modified_base 20: mod_base = OTHER; note = 2'-O-methyl-uridine-3'-phosphorothioate
  modified_base 21: mod_base = OTHER; note = 2'-O-methyl-uridine-3'-phosphate
tgattatgcagtataggtgtt

SEQ ID NO: 2187 - RNA, 21 nt, synthetic construct
  source 1..21: mol_type = other RNA
  modified_base 1: mod_base = OTHER; note = 2'-O-methyl-uridine-3'-phosphorothioate
  modified_base 2: mod_base = OTHER; note = 2'-deoxy-2'-fluoro-guanosine-3'-phosphorothioate
  modified_base 3: mod_base = OTHER; note = 2'-O-methyl-guanosine-3'-phosphate
  modified_base 4: mod_base = OTHER; note = 2'-O-methyl-adenosine-3'-phosphate
  modified_base 5: mod_base = OTHER; note = 2'-O-methyl-uridine-3'-phosphate
  modified_base 6: mod_base = OTHER; note = 2'-deoxy-2'-fluoro-uridine-3'-phosphate
  modified_base 7: mod_base = OTHER; note = 2'-O-methyl-adenosine-3'-phosphate
  modified_base 8: mod_base = OTHER; note = 2'-deoxy-2'-fluoro-uridine-3'-phosphate
  modified_base 9: mod_base = OTHER; note = 2'-deoxy-2'-fluoro-guanosine-3'-phosphate
  modified_base 10: mod_base = OTHER; note = 2'-O-methyl-cytidine-3'-phosphate
  modified_base 11: mod_base = OTHER; note = 2'-O-methyl-adenosine-3'-phosphate
  modified_base 12: mod_base = OTHER; note = 2'-O-methyl-guanosine-3'-phosphate
  modified_base 13: mod_base = OTHER; note = 2'-O-methyl-uridine-3'-phosphate
  modified_base 14: mod_base = OTHER; note = 2'-deoxy-2'-fluoro-adenosine-3'-phosphate
  modified_base 15: mod_base = OTHER; note = 2'-O-methyl-uridine-3'-phosphate
  modified_base 16: mod_base = OTHER; note = 2'-deoxy-2'-fluoro-adenosine-3'-phosphate
  modified_base 17: mod_base = OTHER; note = 2'-O-methyl-guanosine-3'-phosphate
  modified_base 18: mod_base = OTHER; note = 2'-O-methyl-guanosine-3'-phosphate
  modified_base 19: mod_base = OTHER; note = 2'-O-methyl-uridine-3'-phosphorothioate
  modified_base 20: mod_base = OTHER; note = 2'-O-methyl-uridine-3'-phosphorothioate
  modified_base 21: mod_base = OTHER; note = 2'-O-methyl-uridine-3'-phosphate
tggattatgcagtataggttt

SEQ ID NO: 2188 - RNA, 21 nt, synthetic construct
  source 1..21: mol_type = other RNA
  modified_base 1: mod_base = OTHER; note = 2'-O-methyl-uridine-3'-phosphorothioate
  modified_base 2: mod_base = OTHER; note = 2'-deoxy-2'-fluoro-uridine-3'-phosphorothioate
  modified_base 3: mod_base = OTHER; note = 2'-O-methyl-guanosine-3'-phosphate
  modified_base 4: mod_base = OTHER; note = 2'-O-methyl-guanosine-3'-phosphate
  modified_base 5: mod_base = OTHER; note = 2'-O-methyl-adenosine-3'-phosphate
  modified_base 6: mod_base = OTHER; note = 2'-deoxy-2'-fluoro-uridine-3'-phosphate
  modified_base 7: mod_base = OTHER; note = 2'-O-methyl-uridine-3'-phosphate
  modified_base 8: mod_base = OTHER; note = 2'-deoxy-2'-fluoro-adenosine-3'-phosphate
  modified_base 9: mod_base = OTHER; note = 2'-deoxy-2'-fluoro-uridine-3'-phosphate
  modified_base 10: mod_base = OTHER; note = 2'-O-methyl-guanosine-3'-phosphate
  modified_base 11: mod_base = OTHER; note = 2'-O-methyl-cytidine-3'-phosphate
  modified_base 12: mod_base = OTHER; note = 2'-O-methyl-adenosine-3'-phosphate
  modified_base 13: mod_base = OTHER; note = 2'-O-methyl-guanosine-3'-phosphate
  modified_base 14: mod_base = OTHER; note = 2'-deoxy-2'-fluoro-uridine-3'-phosphate
  modified_base 15: mod_base = OTHER; note = 2'-O-methyl-adenosine-3'-phosphate
  modified_base 16: mod_base = OTHER; note = 2'-deoxy-2'-fluoro-uridine-3'-phosphate
  modified_base 17: mod_base = OTHER; note = 2'-O-methyl-adenosine-3'-phosphate
  modified_base 18: mod_base = OTHER; note = 2'-O-methyl-guanosine-3'-phosphate
  modified_base 19: mod_base = OTHER; note = 2'-O-methyl-guanosine-3'-phosphorothioate
  modified_base 20: mod_base = OTHER; note = 2'-O-methyl-uridine-3'-phosphorothioate
  modified_base 21: mod_base = OTHER; note = 2'-O-methyl-uridine-3'-phosphate
ttggattatgcagtataggtt

SEQ ID NO: 2189 - RNA, 21 nt, synthetic construct
  source 1..21: mol_type = other RNA
  modified_base 1: mod_base = OTHER; note = 2'-O-methyl-uridine-3'-phosphorothioate
  modified_base 2: mod_base = OTHER; note = 2'-deoxy-2'-fluoro-guanosine-3'-phosphorothioate
  modified_base 3: mod_base = OTHER; note = 2'-O-methyl-uridine-3'-phosphate
  modified_base 4: mod_base = OTHER; note = 2'-O-methyl-uridine-3'-phosphate
  modified_base 5: mod_base = OTHER; note = 2'-O-methyl-guanosine-3'-phosphate
  modified_base 6: mod_base = OTHER; note = 2'-deoxy-2'-fluoro-guanosine-3'-phosphate
  modified_base 7: mod_base = OTHER; note = 2'-O-methyl-adenosine-3'-phosphate
  modified_base 8: mod_base = OTHER; note = 2'-deoxy-2'-fluoro-uridine-3'-phosphate
  modified_base 9: mod_base = OTHER; note = 2'-deoxy-2'-fluoro-uridine-3'-phosphate
  modified_base 10: mod_base = OTHER; note = 2'-O-methyl-adenosine-3'-phosphate
  modified_base 11: mod_base = OTHER; note = 2'-O-methyl-uridine-3'-phosphate
  modified_base 12: mod_base = OTHER; note = 2'-O-methyl-guanosine-3'-phosphate
  modified_base 13: mod_base = OTHER; note = 2'-O-methyl-cytidine-3'-phosphate
  modified_base 14: mod_base = OTHER; note = 2'-deoxy-2'-fluoro-adenosine-3'-phosphate
  modified_base 15: mod_base = OTHER; note = 2'-O-methyl-guanosine-3'-phosphate
  modified_base 16: mod_base = OTHER; note = 2'-deoxy-2'-fluoro-uridine-3'-phosphate
  modified_base 17: mod_base = OTHER; note = 2'-O-methyl-adenosine-3'-phosphate
  modified_base 18: mod_base = OTHER; note = 2'-O-methyl-uridine-3'-phosphate
  modified_base 19: mod_base = OTHER; note = 2'-O-methyl-adenosine-3'-phosphorothioate
  modified_base 20: mod_base = OTHER; note = 2'-O-methyl-uridine-3'-phosphorothioate
  modified_base 21: mod_base = OTHER; note = 2'-O-methyl-uridine-3'-phosphate
tgttggattatgcagtatatt

SEQ ID NO: 2190 - RNA, 21 nt, synthetic construct
  source 1..21: mol_type = other RNA
  modified_base 1: mod_base = OTHER; note = 2'-O-methyl-uridine-3'-phosphorothioate
  modified_base 2: mod_base = OTHER; note = 2'-deoxy-2'-fluoro-uridine-3'-phosphorothioate
  modified_base 3: mod_base = OTHER; note = 2'-O-methyl-guanosine-3'-phosphate
  modified_base 4: mod_base = OTHER; note = 2'-O-methyl-uridine-3'-phosphate
  modified_base 5: mod_base = OTHER; note = 2'-O-methyl-uridine-3'-phosphate
  modified_base 6: mod_base = OTHER; note = 2'-deoxy-2'-fluoro-guanosine-3'-phosphate
  modified_base 7: mod_base = OTHER; note = 2'-O-methyl-guanosine-3'-phosphate
  modified_base 8: mod_base = OTHER; note = 2'-deoxy-2'-fluoro-adenosine-3'-phosphate
  modified_base 9: mod_base = OTHER; note = 2'-deoxy-2'-fluoro-uridine-3'-phosphate
  modified_base 10: mod_base = OTHER; note = 2'-O-methyl-uridine-3'-phosphate
  modified_base 11: mod_base = OTHER; note = 2'-O-methyl-adenosine-3'-phosphate
  modified_base 12: mod_base = OTHER; note = 2'-O-methyl-uridine-3'-phosphate
  modified_base 13: mod_base = OTHER; note = 2'-O-methyl-guanosine-3'-phosphate
  modified_base 14: mod_base = OTHER; note = 2'-deoxy-2'-fluoro-cytidine-3'-phosphate
  modified_base 15: mod_base = OTHER; note = 2'-O-methyl-adenosine-3'-phosphate
  modified_base 16: mod_base = OTHER; note = 2'-deoxy-2'-fluoro-guanosine-3'-phosphate
  modified_base 17: mod_base = OTHER; note = 2'-O-methyl-uridine-3'-phosphate
  modified_base 18: mod_base = OTHER; note = 2'-O-methyl-adenosine-3'-phosphate
  modified_base 19: mod_base = OTHER; note = 2'-O-methyl-uridine-3'-phosphorothioate
  modified_base 20: mod_base = OTHER; note = 2'-O-methyl-uridine-3'-phosphorothioate
  modified_base 21: mod_base = OTHER; note = 2'-O-methyl-uridine-3'-phosphate
ttgttggattatgcagtattt

SEQ ID NO: 2191 - RNA, 21 nt, synthetic construct
  source 1..21: mol_type = other RNA
  modified_base 1: mod_base = OTHER; note = 2'-O-methyl-uridine-3'-phosphorothioate
  modified_base 2: mod_base = OTHER; note = 2'-deoxy-2'-fluoro-uridine-3'-phosphorothioate
  modified_base 3: mod_base = OTHER; note = 2'-O-methyl-uridine-3'-phosphate
  modified_base 4: mod_base = OTHER; note = 2'-O-methyl-guanosine-3'-phosphate
  modified_base 5: mod_base = OTHER; note = 2'-O-methyl-uridine-3'-phosphate
  modified_base 6: mod_base = OTHER; note = 2'-deoxy-2'-fluoro-uridine-3'-phosphate
  modified_base 7: mod_base = OTHER; note = 2'-O-methyl-guanosine-3'-phosphate
  modified_base 8: mod_base = OTHER; note = 2'-deoxy-2'-fluoro-guanosine-3'-phosphate
  modified_base 9: mod_base = OTHER; note = 2'-deoxy-2'-fluoro-adenosine-3'-phosphate
  modified_base 10: mod_base = OTHER; note = 2'-O-methyl-uridine-3'-phosphate
  modified_base 11: mod_base = OTHER; note = 2'-O-methyl-uridine-3'-phosphate
  modified_base 12: mod_base = OTHER; note = 2'-O-methyl-adenosine-3'-phosphate
  modified_base 13: mod_base = OTHER; note = 2'-O-methyl-uridine-3'-phosphate
  modified_base 14: mod_base = OTHER; note = 2'-deoxy-2'-fluoro-guanosine-3'-phosphate
  modified_base 15: mod_base = OTHER; note = 2'-O-methyl-cytidine-3'-phosphate
  modified_base 16: mod_base = OTHER; note = 2'-deoxy-2'-fluoro-adenosine-3'-phosphate
  modified_base 17: mod_base = OTHER; note = 2'-O-methyl-guanosine-3'-phosphate
  modified_base 18: mod_base = OTHER; note = 2'-O-methyl-uridine-3'-phosphate
  modified_base 19: mod_base = OTHER; note = 2'-O-methyl-adenosine-3'-phosphorothioate
  modified_base 20: mod_base = OTHER; note = 2'-O-methyl-uridine-3'-phosphorothioate
  modified_base 21: mod_base = OTHER; note = 2'-O-methyl-uridine-3'-phosphate
tttgttggattatgcagtatt

SEQ ID NO: 2192 - RNA, 21 nt, synthetic construct
  source 1..21: mol_type = other RNA
  modified_base 1: mod_base = OTHER; note = 2'-O-methyl-uridine-3'-phosphorothioate
  modified_base 2: mod_base = OTHER; note = 2'-deoxy-2'-fluoro-adenosine-3'-phosphorothioate
  modified_base 3: mod_base = OTHER; note = 2'-O-methyl-uridine-3'-phosphate
  modified_base 4: mod_base = OTHER; note = 2'-O-methyl-uridine-3'-phosphate
  modified_base 5: mod_base = OTHER; note = 2'-O-methyl-guanosine-3'-phosphate
  modified_base 6: mod_base = OTHER; note = 2'-deoxy-2'-fluoro-uridine-3'-phosphate
  modified_base 7: mod_base = OTHER; note = 2'-O-methyl-uridine-3'-phosphate
  modified_base 8: mod_base = OTHER; note = 2'-deoxy-2'-fluoro-guanosine-3'-phosphate
  modified_base 9: mod_base = OTHER; note = 2'-deoxy-2'-fluoro-guanosine-3'-phosphate
  modified_base 10: mod_base = OTHER; note = 2'-O-methyl-adenosine-3'-phosphate
  modified_base 11: mod_base = OTHER; note = 2'-O-methyl-uridine-3'-phosphate
  modified_base 12: mod_base = OTHER; note = 2'-O-methyl-uridine-3'-phosphate
  modified_base 13: mod_base = OTHER; note = 2'-O-methyl-adenosine-3'-phosphate
  modified_base 14: mod_base = OTHER; note = 2'-deoxy-2'-fluoro-uridine-3'-phosphate
  modified_base 15: mod_base = OTHER; note = 2'-O-methyl-guanosine-3'-phosphate
  modified_base 16: mod_base = OTHER; note = 2'-deoxy-2'-fluoro-cytidine-3'-phosphate
  modified_base 17: mod_base = OTHER; note = 2'-O-methyl-adenosine-3'-phosphate
  modified_base 18: mod_base = OTHER; note = 2'-O-methyl-guanosine-3'-phosphate
  modified_base 19: mod_base = OTHER; note = 2'-O-methyl-uridine-3'-phosphorothioate
  modified_base 20: mod_base = OTHER; note = 2'-O-methyl-uridine-3'-phosphorothioate
  modified_base 21: mod_base = OTHER; note = 2'-O-methyl-uridine-3'-phosphate
tattgttggattatgcagttt

SEQ ID NO: 2193 - RNA, 21 nt, synthetic construct
  source 1..21: mol_type = other RNA
  modified_base 1: mod_base = OTHER; note = 2'-O-methyl-uridine-3'-phosphorothioate
  modified_base 2: mod_base = OTHER; note = 2'-deoxy-2'-fluoro-uridine-3'-phosphorothioate
  modified_base 3: mod_base = OTHER; note = 2'-O-methyl-uridine-3'-phosphate
  modified_base 4: mod_base = OTHER; note = 2'-O-methyl-adenosine-3'-phosphate
  modified_base 5: mod_base = OTHER; note = 2'-O-methyl-guanosine-3'-phosphate
  modified_base 6: mod_base = OTHER; note = 2'-deoxy-2'-fluoro-uridine-3'-phosphate
  modified_base 7: mod_base = OTHER; note = 2'-O-methyl-adenosine-3'-phosphate
  modified_base 8: mod_base = OTHER; note = 2'-deoxy-2'-fluoro-adenosine-3'-phosphate
  modified_base 9: mod_base = OTHER; note = 2'-deoxy-2'-fluoro-cytidine-3'-phosphate
  modified_base 10: mod_base = OTHER; note = 2'-O-methyl-adenosine-3'-phosphate
  modified_base 11: mod_base = OTHER; note = 2'-O-methyl-uridine-3'-phosphate
  modified_base 12: mod_base = OTHER; note = 2'-O-methyl-guanosine-3'-phosphate
  modified_base 13: mod_base = OTHER; note = 2'-O-methyl-uridine-3'-phosphate
  modified_base 14: mod_base = OTHER; note = 2'-deoxy-2'-fluoro-cytidine-3'-phosphate
  modified_base 15: mod_base = OTHER; note = 2'-O-methyl-uridine-3'-phosphate
  modified_base 16: mod_base = OTHER; note = 2'-deoxy-2'-fluoro-uridine-3'-phosphate
  modified_base 17: mod_base = OTHER; note = 2'-O-methyl-cytidine-3'-phosphate
  modified_base 18: mod_base = OTHER; note = 2'-O-methyl-adenosine-3'-phosphate
  modified_base 19: mod_base = OTHER; note = 2'-O-methyl-adenosine-3'-phosphorothioate
  modified_base 20: mod_base = OTHER; note = 2'-O-methyl-uridine-3'-phosphorothioate
  modified_base 21: mod_base = OTHER; note = 2'-O-methyl-uridine-3'-phosphate
tttagtaacatgtcttcaatt

SEQ ID NO: 2194 - RNA, 21 nt, synthetic construct
  source 1..21: mol_type = other RNA
  modified_base 1: mod_base = OTHER; note = 2'-O-methyl-uridine-3'-phosphorothioate
  modified_base 2: mod_base = OTHER; note = 2'-deoxy-2'-fluoro-adenosine-3'-phosphorothioate
  modified_base 3: mod_base = OTHER; note = 2'-O-methyl-uridine-3'-phosphate
  modified_base 4: mod_base = OTHER; note = 2'-O-methyl-uridine-3'-phosphate
  modified_base 5: mod_base = OTHER; note = 2'-O-methyl-adenosine-3'-phosphate
  modified_base 6: mod_base = OTHER; note = 2'-deoxy-2'-fluoro-guanosine-3'-phosphate
  modified_base 7: mod_base = OTHER; note = 2'-O-methyl-uridine-3'-phosphate
  modified_base 8: mod_base = OTHER; note = 2'-deoxy-2'-fluoro-adenosine-3'-phosphate
  modified_base 9: mod_base = OTHER; note = 2'-deoxy-2'-fluoro-adenosine-3'-phosphate
  modified_base 10: mod_base = OTHER; note = 2'-O-methyl-cytidine-3'-phosphate
  modified_base 11: mod_base = OTHER; note = 2'-O-methyl-adenosine-3'-phosphate
  modified_base 12: mod_base = OTHER; note = 2'-O-methyl-uridine-3'-phosphate
  modified_base 13: mod_base = OTHER; note = 2'-O-methyl-guanosine-3'-phosphate
  modified_base 14: mod_base = OTHER; note = 2'-deoxy-2'-fluoro-uridine-3'-phosphate
  modified_base 15: mod_base = OTHER; note = 2'-O-methyl-cytidine-3'-phosphate
  modified_base 16: mod_base = OTHER; note = 2'-deoxy-2'-fluoro-uridine-3'-phosphate
  modified_base 17: mod_base = OTHER; note = 2'-O-methyl-uridine-3'-phosphate
  modified_base 18: mod_base = OTHER; note = 2'-O-methyl-cytidine-3'-phosphate
  modified_base 19: mod_base = OTHER; note = 2'-O-methyl-adenosine-3'-phosphorothioate
  modified_base 20: mod_base = OTHER; note = 2'-O-methyl-uridine-3'-phosphorothioate
  modified_base 21: mod_base = OTHER; note = 2'-O-methyl-uridine-3'-phosphate
tattagtaacatgtcttcatt

SEQ ID NO: 2195 - RNA, 21 nt, synthetic construct
  source 1..21: mol_type = other RNA
  modified_base 1: mod_base = OTHER; note = 2'-O-methyl-uridine-3'-phosphorothioate
  modified_base 2: mod_base = OTHER; note = 2'-deoxy-2'-fluoro-guanosine-3'-phosphorothioate
  modified_base 3: mod_base = OTHER; note = 2'-O-methyl-uridine-3'-phosphate
  modified_base 4: mod_base = OTHER; note = 2'-O-methyl-uridine-3'-phosphate
  modified_base 5: mod_base = OTHER; note = 2'-O-methyl-adenosine-3'-phosphate
  modified_base 6: mod_base = OTHER; note = 2'-deoxy-2'-fluoro-uridine-3'-phosphate
  modified_base 7: mod_base = OTHER; note = 2'-O-methyl-adenosine-3'-phosphate
  modified_base 8: mod_base = OTHER; note = 2'-deoxy-2'-fluoro-uridine-3'-phosphate
  modified_base 9: mod_base = OTHER; note = 2'-deoxy-2'-fluoro-uridine-3'-phosphate
  modified_base 10: mod_base = OTHER; note = 2'-O-methyl-adenosine-3'-phosphate
  modified_base 11: mod_base = OTHER; note = 2'-O-methyl-guanosine-3'-phosphate
  modified_base 12: mod_base = OTHER; note = 2'-O-methyl-uridine-3'-phosphate
  modified_base 13: mod_base = OTHER; note = 2'-O-methyl-adenosine-3'-phosphate
  modified_base 14: mod_base = OTHER; note = 2'-deoxy-2'-fluoro-adenosine-3'-phosphate
  modified_base 15: mod_base = OTHER; note = 2'-O-methyl-cytidine-3'-phosphate
  modified_base 16: mod_base = OTHER; note = 2'-deoxy-2'-fluoro-adenosine-3'-phosphate
  modified_base 17: mod_base = OTHER; note = 2'-O-methyl-uridine-3'-phosphate
  modified_base 18: mod_base = OTHER; note = 2'-O-methyl-guanosine-3'-phosphate
  modified_base 19: mod_base = OTHER; note = 2'-O-methyl-uridine-3'-phosphorothioate
  modified_base 20: mod_base = OTHER; note = 2'-O-methyl-uridine-3'-phosphorothioate
  modified_base 21: mod_base = OTHER; note = 2'-O-methyl-uridine-3'-phosphate
tgttatattagtaacatgttt

SEQ ID NO: 2196 - RNA, 21 nt, synthetic construct
  source 1..21: mol_type = other RNA
  modified_base 1: mod_base = OTHER; note = 2'-O-methyl-uridine-3'-phosphorothioate
  modified_base 2: mod_base = OTHER; note = 2'-deoxy-2'-fluoro-uridine-3'-phosphorothioate
  modified_base 3: mod_base = OTHER; note = 2'-O-methyl-uridine-3'-phosphate
  modified_base 4: mod_base = OTHER; note = 2'-O-methyl-adenosine-3'-phosphate
  modified_base 5: mod_base = OTHER; note = 2'-O-methyl-cytidine-3'-phosphate
  modified_base 6: mod_base = OTHER; note = 2'-deoxy-2'-fluoro-adenosine-3'-phosphate
  modified_base 7: mod_base = OTHER; note = 2'-O-methyl-cytidine-3'-phosphate
  modified_base 8: mod_base = OTHER; note = 2'-deoxy-2'-fluoro-adenosine-3'-phosphate
  modified_base 9: mod_base = OTHER; note = 2'-deoxy-2'-fluoro-uridine-3'-phosphate
  modified_base 10: mod_base = OTHER; note = 2'-O-methyl-cytidine-3'-phosphate
  modified_base 11: mod_base = OTHER; note = 2'-O-methyl-cytidine-3'-phosphate
  modified_base 12: mod_base = OTHER; note = 2'-O-methyl-uridine-3'-phosphate
  modified_base 13: mod_base = OTHER; note = 2'-O-methyl-cytidine-3'-phosphate
  modified_base 14: mod_base = OTHER; note = 2'-deoxy-2'-fluoro-uridine-3'-phosphate
  modified_base 15: mod_base = OTHER; note = 2'-O-methyl-adenosine-3'-phosphate
  modified_base 16: mod_base = OTHER; note = 2'-deoxy-2'-fluoro-cytidine-3'-phosphate
  modified_base 17: mod_base = OTHER; note = 2'-O-methyl-uridine-3'-phosphate
  modified_base 18: mod_base = OTHER; note = 2'-O-methyl-cytidine-3'-phosphate
  modified_base 19: mod_base = OTHER; note = 2'-O-methyl-uridine-3'-phosphorothioate
  modified_base 20: mod_base = OTHER; note = 2'-O-methyl-uridine-3'-phosphorothioate
  modified_base 21: mod_base = OTHER; note = 2'-O-methyl-uridine-3'-phosphate
tttacacatcctctactcttt

SEQ ID NO: 2197 - RNA, 21 nt, synthetic construct
  source 1..21: mol_type = other RNA
  modified_base 1: mod_base = OTHER; note = 2'-O-methyl-uridine-3'-phosphorothioate
  modified_base 2: mod_base = OTHER; note = 2'-deoxy-2'-fluoro-adenosine-3'-phosphorothioate
  modified_base 3: mod_base = OTHER; note = 2'-O-methyl-guanosine-3'-phosphate
  modified_base 4: mod_base = OTHER; note = 2'-O-methyl-adenosine-3'-phosphate
  modified_base 5: mod_base = OTHER; note = 2'-O-methyl-uridine-3'-phosphate
  modified_base 6: mod_base = OTHER; note = 2'-deoxy-2'-fluoro-adenosine-3'-phosphate
  modified_base 7: mod_base = OTHER; note = 2'-O-methyl-uridine-3'-phosphate
  modified_base 8: mod_base = OTHER; note = 2'-deoxy-2'-fluoro-guanosine-3'-phosphate
  modified_base 9: mod_base = OTHER; note = 2'-deoxy-2'-fluoro-guanosine-3'-phosphate
  modified_base 10: mod_base = OTHER; note = 2'-O-methyl-uridine-3'-phosphate
  modified_base 11: mod_base = OTHER; note = 2'-O-methyl-uridine-3'-phosphate
  modified_base 12: mod_base = OTHER; note = 2'-O-methyl-adenosine-3'-phosphate
  modified_base 13: mod_base = OTHER; note = 2'-O-methyl-adenosine-3'-phosphate
  modified_base 14: mod_base = OTHER; note = 2'-deoxy-2'-fluoro-uridine-3'-phosphate
  modified_base 15: mod_base = OTHER; note = 2'-O-methyl-uridine-3'-phosphate
  modified_base 16: mod_base = OTHER; note = 2'-deoxy-2'-fluoro-adenosine-3'-phosphate
  modified_base 17: mod_base = OTHER; note = 2'-O-methyl-cytidine-3'-phosphate
  modified_base 18: mod_base = OTHER; note = 2'-O-methyl-adenosine-3'-phosphate
  modified_base 19: mod_base = OTHER; note = 2'-O-methyl-cytidine-3'-phosphorothioate
  modified_base 20: mod_base = OTHER; note = 2'-O-methyl-uridine-3'-phosphorothioate
  modified_base 21: mod_base = OTHER; note = 2'-O-methyl-uridine-3'-phosphate
tagatatggttaattacactt

SEQ ID NO: 2198 - RNA, 21 nt, synthetic construct
  source 1..21: mol_type = other RNA
  modified_base 1: mod_base = OTHER; note = 2'-O-methyl-uridine-3'-phosphorothioate
  modified_base 2: mod_base = OTHER; note = 2'-deoxy-2'-fluoro-guanosine-3'-phosphorothioate
  modified_base 3: mod_base = OTHER; note = 2'-O-methyl-adenosine-3'-phosphate
  modified_base 4: mod_base = OTHER; note = 2'-O-methyl-adenosine-3'-phosphate
  modified_base 5: mod_base = OTHER; note = 2'-O-methyl-adenosine-3'-phosphate
  modified_base 6: mod_base = OTHER; note = 2'-deoxy-2'-fluoro-cytidine-3'-phosphate
  modified_base 7: mod_base = OTHER; note = 2'-O-methyl-cytidine-3'-phosphate
  modified_base 8: mod_base = OTHER; note = 2'-deoxy-2'-fluoro-adenosine-3'-phosphate
  modified_base 9: mod_base = OTHER; note = 2'-deoxy-2'-fluoro-adenosine-3'-phosphate
  modified_base 10: mod_base = OTHER; note = 2'-O-methyl-guanosine-3'-phosphate
  modified_base 11: mod_base = OTHER; note = 2'-O-methyl-guanosine-3'-phosphate
  modified_base 12: mod_base = OTHER; note = 2'-O-methyl-uridine-3'-phosphate
  modified_base 13: mod_base = OTHER; note = 2'-O-methyl-cytidine-3'-phosphate
  modified_base 14: mod_base = OTHER; note = 2'-deoxy-2'-fluoro-adenosine-3'-phosphate
  modified_base 15: mod_base = OTHER; note = 2'-O-methyl-adenosine-3'-phosphate
  modified_base 16: mod_base = OTHER; note = 2'-deoxy-2'-fluoro-uridine-3'-phosphate
  modified_base 17: mod_base = OTHER; note = 2'-O-methyl-adenosine-3'-phosphate
  modified_base 18: mod_base = OTHER; note = 2'-O-methyl-uridine-3'-phosphate
  modified_base 19: mod_base = OTHER; note = 2'-O-methyl-uridine-3'-phosphorothioate
  modified_base 20: mod_base = OTHER; note = 2'-O-methyl-uridine-3'-phosphorothioate
  modified_base 21: mod_base = OTHER; note = 2'-O-methyl-uridine-3'-phosphate
tgaaaccaaggtcaatatttt

SEQ ID NO: 2199 - RNA, 21 nt, synthetic construct
  source 1..21: mol_type = other RNA
  modified_base 1: mod_base = OTHER; note = 2'-O-methyl-uridine-3'-phosphorothioate
  modified_base 2: mod_base = OTHER; note = 2'-deoxy-2'-fluoro-adenosine-3'-phosphorothioate
  modified_base 3: mod_base = OTHER; note = 2'-O-methyl-guanosine-3'-phosphate
  modified_base 4: mod_base = OTHER; note = 2'-O-methyl-adenosine-3'-phosphate
  modified_base 5: mod_base = OTHER; note = 2'-O-methyl-adenosine-3'-phosphate
  modified_base 6: mod_base = OTHER; note = 2'-deoxy-2'-fluoro-adenosine-3'-phosphate
  modified_base 7: mod_base = OTHER; note = 2'-O-methyl-cytidine-3'-phosphate
  modified_base 8: mod_base = OTHER; note = 2'-deoxy-2'-fluoro-cytidine-3'-phosphate
  modified_base 9: mod_base = OTHER; note = 2'-deoxy-2'-fluoro-adenosine-3'-phosphate
  modified_base 10: mod_base = OTHER; note = 2'-O-methyl-adenosine-3'-phosphate
  modified_base 11: mod_base = OTHER; note = 2'-O-methyl-guanosine-3'-phosphate
  modified_base 12: mod_base = OTHER; note = 2'-O-methyl-guanosine-3'-phosphate
  modified_base 13: mod_base = OTHER; note = 2'-O-methyl-uridine-3'-phosphate
  modified_base 14: mod_base = OTHER; note = 2'-deoxy-2'-fluoro-cytidine-3'-phosphate
  modified_base 15: mod_base = OTHER; note = 2'-O-methyl-adenosine-3'-phosphate
  modified_base 16: mod_base = OTHER; note = 2'-deoxy-2'-fluoro-adenosine-3'-phosphate
  modified_base 17: mod_base = OTHER; note = 2'-O-methyl-uridine-3'-phosphate
  modified_base 18: mod_base = OTHER; note = 2'-O-methyl-adenosine-3'-phosphate
  modified_base 19: mod_base = OTHER; note = 2'-O-methyl-uridine-3'-phosphorothioate
  modified_base 20: mod_base = OTHER; note = 2'-O-methyl-uridine-3'-phosphorothioate
  modified_base 21: mod_base = OTHER; note = 2'-O-methyl-uridine-3'-phosphate
tagaaaccaaggtcaatattt

SEQ ID NO: 2200 - RNA, 21 nt, synthetic construct
  source 1..21: mol_type = other RNA
  modified_base 1: mod_base = OTHER; note = 2'-O-methyl-uridine-3'-phosphorothioate
  modified_base 2: mod_base = OTHER; note = 2'-deoxy-2'-fluoro-uridine-3'-phosphorothioate
  modified_base 3: mod_base = OTHER; note = 2'-O-methyl-adenosine-3'-phosphate
  modified_base 4: mod_base = OTHER; note = 2'-O-methyl-adenosine-3'-phosphate
  modified_base 5: mod_base = OTHER; note = 2'-O-methyl-guanosine-3'-phosphate
  modified_base 6: mod_base = OTHER; note = 2'-deoxy-2'-fluoro-adenosine-3'-phosphate
  modified_base 7: mod_base = OTHER; note = 2'-O-methyl-adenosine-3'-phosphate
  modified_base 8: mod_base = OTHER; note = 2'-deoxy-2'-fluoro-adenosine-3'-phosphate
  modified_base 9: mod_base = OTHER; note = 2'-deoxy-2'-fluoro-cytidine-3'-phosphate
  modified_base 10: mod_base = OTHER; note = 2'-O-methyl-cytidine-3'-phosphate
  modified_base 11: mod_base = OTHER; note = 2'-O-methyl-adenosine-3'-phosphate
  modified_base 12: mod_base = OTHER; note = 2'-O-methyl-adenosine-3'-phosphate
  modified_base 13: mod_base = OTHER; note = 2'-O-methyl-guanosine-3'-phosphate
  modified_base 14: mod_base = OTHER; note = 2'-deoxy-2'-fluoro-guanosine-3'-phosphate
  modified_base 15: mod_base = OTHER; note = 2'-O-methyl-uridine-3'-phosphate
  modified_base 16: mod_base = OTHER; note = 2'-deoxy-2'-fluoro-cytidine-3'-phosphate
  modified_base 17: mod_base = OTHER; note = 2'-O-methyl-adenosine-3'-phosphate
  modified_base 18: mod_base = OTHER; note = 2'-O-methyl-adenosine-3'-phosphate
  modified_base 19: mod_base = OTHER; note = 2'-O-methyl-uridine-3'-phosphorothioate
  modified_base 20: mod_base = OTHER; note = 2'-O-methyl-uridine-3'-phosphorothioate
  modified_base 21: mod_base = OTHER; note = 2'-O-methyl-uridine-3'-phosphate
ttaagaaaccaaggtcaattt

SEQ ID NO: 2201 - RNA, 21 nt, synthetic construct
  source 1..21: mol_type = other RNA
  modified_base 1: mod_base = OTHER; note = 2'-O-methyl-uridine-3'-phosphorothioate
  modified_base 2: mod_base = OTHER; note = 2'-deoxy-2'-fluoro-uridine-3'-phosphorothioate
  modified_base 3: mod_base = OTHER; note = 2'-O-methyl-guanosine-3'-phosphate
  modified_base 4: mod_base = OTHER; note = 2'-O-methyl-uridine-3'-phosphate
  modified_base 5: mod_base = OTHER; note = 2'-O-methyl-guanosine-3'-phosphate
  modified_base 6: mod_base = OTHER; note = 2'-deoxy-2'-fluoro-uridine-3'-phosphate
  modified_base 7: mod_base = OTHER; note = 2'-O-methyl-adenosine-3'-phosphate
  modified_base 8: mod_base = OTHER; note = 2'-deoxy-2'-fluoro-adenosine-3'-phosphate
  modified_base 9: mod_base = OTHER; note = 2'-deoxy-2'-fluoro-guanosine-3'-phosphate
  modified_base 10: mod_base = OTHER; note = 2'-O-methyl-adenosine-3'-phosphate
  modified_base 11: mod_base = OTHER; note = 2'-O-methyl-adenosine-3'-phosphate
  modified_base 12: mod_base = OTHER; note = 2'-O-methyl-adenosine-3'-phosphate
  modified_base 13: mod_base = OTHER; note = 2'-O-methyl-cytidine-3'-phosphate
  modified_base 14: mod_base = OTHER; note = 2'-deoxy-2'-fluoro-cytidine-3'-phosphate
  modified_base 15: mod_base = OTHER; note = 2'-O-methyl-adenosine-3'-phosphate
  modified_base 16: mod_base = OTHER; note = 2'-deoxy-2'-fluoro-adenosine-3'-phosphate
  modified_base 17: mod_base = OTHER; note = 2'-O-methyl-guanosine-3'-phosphate
  modified_base 18: mod_base = OTHER; note = 2'-O-methyl-guanosine-3'-phosphate
  modified_base 19: mod_base = OTHER; note = 2'-O-methyl-uridine-3'-phosphorothioate
  modified_base 20: mod_base = OTHER; note = 2'-O-methyl-uridine-3'-phosphorothioate
  modified_base 21: mod_base = OTHER; note = 2'-O-methyl-uridine-3'-phosphate
ttgtgtaagaaaccaaggttt

SEQ ID NO: 2202 - RNA, 21 nt, synthetic construct
  source 1..21: mol_type = other RNA
  modified_base 1: mod_base = OTHER; note = 2'-O-methyl-uridine-3'-phosphorothioate
  modified_base 2: mod_base = OTHER; note = 2'-deoxy-2'-fluoro-adenosine-3'-phosphorothioate
  modified_base 3: mod_base = OTHER; note = 2'-O-methyl-cytidine-3'-phosphate
  modified_base 4: mod_base = OTHER; note = 2'-O-methyl-adenosine-3'-phosphate
  modified_base 5: mod_base = OTHER; note = 2'-O-methyl-cytidine-3'-phosphate
  modified_base 6: mod_base = OTHER; note = 2'-deoxy-2'-fluoro-uridine-3'-phosphate
  modified_base 7: mod_base = OTHER; note = 2'-O-methyl-uridine-3'-phosphate
  modified_base 8: mod_base = OTHER; note = 2'-deoxy-2'-fluoro-guanosine-3'-phosphate
  modified_base 9: mod_base = OTHER; note = 2'-deoxy-2'-fluoro-uridine-3'-phosphate
  modified_base 10: mod_base = OTHER; note = 2'-O-methyl-guanosine-3'-phosphate
  modified_base 11: mod_base = OTHER; note = 2'-O-methyl-uridine-3'-phosphate
  modified_base 12: mod_base = OTHER; note = 2'-O-methyl-adenosine-3'-phosphate
  modified_base 13: mod_base = OTHER; note = 2'-O-methyl-adenosine-3'-phosphate
  modified_base 14: mod_base = OTHER; note = 2'-deoxy-2'-fluoro-guanosine-3'-phosphate
  modified_base 15: mod_base = OTHER; note = 2'-O-methyl-adenosine-3'-phosphate
  modified_base 16: mod_base = OTHER; note = 2'-deoxy-2'-fluoro-adenosine-3'-phosphate
  modified_base 17: mod_base = OTHER; note = 2'-O-methyl-adenosine-3'-phosphate
  modified_base 18: mod_base = OTHER; note = 2'-O-methyl-cytidine-3'-phosphate
  modified_base 19: mod_base = OTHER; note = 2'-O-methyl-cytidine-3'-phosphorothioate
  modified_base 20: mod_base = OTHER; note = 2'-O-methyl-uridine-3'-phosphorothioate
  modified_base 21: mod_base = OTHER; note = 2'-O-methyl-uridine-3'-phosphate
tacacttgtgtaagaaacctt

SEQ ID NO: 2203 - RNA, 21 nt, synthetic construct
  source 1..21: mol_type = other RNA
  modified_base 1: mod_base = OTHER; note = 2'-O-methyl-uridine-3'-phosphorothioate
  modified_base 2: mod_base = OTHER; note = 2'-deoxy-2'-fluoro-cytidine-3'-phosphorothioate
  modified_base 3: mod_base = OTHER; note = 2'-O-methyl-adenosine-3'-phosphate
  modified_base 4: mod_base = OTHER; note = 2'-O-methyl-adenosine-3'-phosphate
  modified_base 5: mod_base = OTHER; note = 2'-O-methyl-cytidine-3'-phosphate
  modified_base 6: mod_base = OTHER; note = 2'-deoxy-2'-fluoro-adenosine-3'-phosphate
  modified_base 7: mod_base = OTHER; note = 2'-O-methyl-cytidine-3'-phosphate
  modified_base 8: mod_base = OTHER; note = 2'-deoxy-2'-fluoro-uridine-3'-phosphate
  modified_base 9: mod_base = OTHER; note = 2'-deoxy-2'-fluoro-uridine-3'-phosphate
  modified_base 10: mod_base = OTHER; note = 2'-O-methyl-guanosine-3'-phosphate
  modified_base 11: mod_base = OTHER; note = 2'-O-methyl-uridine-3'-phosphate
  modified_base 12: mod_base = OTHER; note = 2'-O-methyl-guanosine-3'-phosphate
  modified_base 13: mod_base = OTHER; note = 2'-O-methyl-uridine-3'-phosphate
  modified_base 14: mod_base = OTHER; note = 2'-deoxy-2'-fluoro-adenosine-3'-phosphate
  modified_base 15: mod_base = OTHER; note = 2'-O-methyl-adenosine-3'-phosphate
  modified_base 16: mod_base = OTHER; note = 2'-deoxy-2'-fluoro-guanosine-3'-phosphate
  modified_base 17: mod_base = OTHER; note = 2'-O-methyl-adenosine-3'-phosphate
  modified_base 18: mod_base = OTHER; note = 2'-O-methyl-adenosine-3'-phosphate
  modified_base 19: mod_base = OTHER; note = 2'-O-methyl-adenosine-3'-phosphorothioate
  modified_base 20: mod_base = OTHER; note = 2'-O-methyl-uridine-3'-phosphorothioate
  modified_base 21: mod_base = OTHER; note = 2'-O-methyl-uridine-3'-phosphate
tcaacacttgtgtaagaaatt

SEQ ID NO: 2204 - RNA, 21 nt, synthetic construct
  source 1..21: mol_type = other RNA
  modified_base 1: mod_base = OTHER; note = 2'-O-methyl-uridine-3'-phosphorothioate
  modified_base 2: mod_base = OTHER; note = 2'-deoxy-2'-fluoro-adenosine-3'-phosphorothioate
  modified_base 3: mod_base = OTHER; note = 2'-O-methyl-guanosine-3'-phosphate
  modified_base 4: mod_base = OTHER; note = 2'-O-methyl-cytidine-3'-phosphate
  modified_base 5: mod_base = OTHER; note = 2'-O-methyl-adenosine-3'-phosphate
  modified_base 6: mod_base = OTHER; note = 2'-deoxy-2'-fluoro-adenosine-3'-phosphate
  modified_base 7: mod_base = OTHER; note = 2'-O-methyl-cytidine-3'-phosphate
  modified_base 8: mod_base = OTHER; note = 2'-deoxy-2'-fluoro-adenosine-3'-phosphate
  modified_base 9: mod_base = OTHER; note = 2'-deoxy-2'-fluoro-cytidine-3'-phosphate
  modified_base 10: mod_base = OTHER; note = 2'-O-methyl-uridine-3'-phosphate
  modified_base 11: mod_base = OTHER; note = 2'-O-methyl-uridine-3'-phosphate
  modified_base 12: mod_base = OTHER; note = 2'-O-methyl-guanosine-3'-phosphate
  modified_base 13: mod_base = OTHER; note = 2'-O-methyl-uridine-3'-phosphate
  modified_base 14: mod_base = OTHER; note = 2'-deoxy-2'-fluoro-guanosine-3'-phosphate
  modified_base 15: mod_base = OTHER; note = 2'-O-methyl-uridine-3'-phosphate
  modified_base 16: mod_base = OTHER; note = 2'-deoxy-2'-fluoro-adenosine-3'-phosphate
  modified_base 17: mod_base = OTHER; note = 2'-O-methyl-adenosine-3'-phosphate
  modified_base 18: mod_base = OTHER; note = 2'-O-methyl-guanosine-3'-phosphate
  modified_base 19: mod_base = OTHER; note = 2'-O-methyl-adenosine-3'-phosphorothioate
  modified_base 20: mod_base = OTHER; note = 2'-O-methyl-uridine-3'-phosphorothioate
  modified_base 21: mod_base = OTHER; note = 2'-O-methyl-uridine-3'-phosphate
tagcaacacttgtgtaagatt

SEQ ID NO: 2205 - RNA, 21 nt, synthetic construct
  source 1..21: mol_type = other RNA
  modified_base 1: mod_base = OTHER; note = 2'-O-methyl-uridine-3'-phosphorothioate
  modified_base 2: mod_base = OTHER; note = 2'-deoxy-2'-fluoro-uridine-3'-phosphorothioate
  modified_base 3: mod_base = OTHER; note = 2'-O-methyl-guanosine-3'-phosphate
  modified_base 4: mod_base = OTHER; note = 2'-O-methyl-adenosine-3'-phosphate
  modified_base 5: mod_base = OTHER; note = 2'-O-methyl-guanosine-3'-phosphate
  modified_base 6: mod_base = OTHER; note = 2'-deoxy-2'-fluoro-uridine-3'-phosphate
  modified_base 7: mod_base = OTHER; note = 2'-O-methyl-uridine-3'-phosphate
  modified_base 8: mod_base = OTHER; note = 2'-deoxy-2'-fluoro-adenosine-3'-phosphate
  modified_base 9: mod_base = OTHER; note = 2'-deoxy-2'-fluoro-guanosine-3'-phosphate
  modified_base 10: mod_base = OTHER; note = 2'-O-methyl-cytidine-3'-phosphate
  modified_base 11: mod_base = OTHER; note = 2'-O-methyl-adenosine-3'-phosphate
  modified_base 12: mod_base = OTHER; note = 2'-O-methyl-adenosine-3'-phosphate
  modified_base 13: mod_base = OTHER; note = 2'-O-methyl-cytidine-3'-phosphate
  modified_base 14: mod_base = OTHER; note = 2'-deoxy-2'-fluoro-adenosine-3'-phosphate
  modified_base 15: mod_base = OTHER; note = 2'-O-methyl-cytidine-3'-phosphate
  modified_base 16: mod_base = OTHER; note = 2'-deoxy-2'-fluoro-uridine-3'-phosphate
  modified_base 17: mod_base = OTHER; note = 2'-O-methyl-uridine-3'-phosphate
  modified_base 18: mod_base = OTHER; note = 2'-O-methyl-guanosine-3'-phosphate
  modified_base 19: mod_base = OTHER; note = 2'-O-methyl-uridine-3'-phosphorothioate
  modified_base 20: mod_base = OTHER; note = 2'-O-methyl-uridine-3'-phosphorothioate
  modified_base 21: mod_base = OTHER; note = 2'-O-methyl-uridine-3'-phosphate
ttgagttagcaacacttgttt

SEQ ID NO: 2206 - RNA, 21 nt, synthetic construct
  source 1..21: mol_type = other RNA
  modified_base 1: mod_base = OTHER; note = 2'-O-methyl-uridine-3'-phosphorothioate
  modified_base 2: mod_base = OTHER; note = 2'-deoxy-2'-fluoro-uridine-3'-phosphorothioate
  modified_base 3: mod_base = OTHER; note = 2'-O-methyl-adenosine-3'-phosphate
  modified_base 4: mod_base = OTHER; note = 2'-O-methyl-uridine-3'-phosphate
  modified_base 5: mod_base = OTHER; note = 2'-O-methyl-uridine-3'-phosphate
  modified_base 6: mod_base = OTHER; note = 2'-deoxy-2'-fluoro-guanosine-3'-phosphate
  modified_base 7: mod_base = OTHER; note = 2'-O-methyl-adenosine-3'-phosphate
  modified_base 8: mod_base = OTHER; note = 2'-deoxy-2'-fluoro-guanosine-3'-phosphate
  modified_base 9: mod_base = OTHER; note = 2'-deoxy-2'-fluoro-uridine-3'-phosphate
  modified_base 10: mod_base = OTHER; note = 2'-O-methyl-uridine-3'-phosphate
  modified_base 11: mod_base = OTHER; note = 2'-O-methyl-adenosine-3'-phosphate
  modified_base 12: mod_base = OTHER; note = 2'-O-methyl-guanosine-3'-phosphate
  modified_base 13: mod_base = OTHER; note = 2'-O-methyl-cytidine-3'-phosphate
  modified_base 14: mod_base = OTHER; note = 2'-deoxy-2'-fluoro-adenosine-3'-phosphate
  modified_base 15: mod_base = OTHER; note = 2'-O-methyl-adenosine-3'-phosphate
  modified_base 16: mod_base = OTHER; note = 2'-deoxy-2'-fluoro-cytidine-3'-phosphate
  modified_base 17: mod_base = OTHER; note = 2'-O-methyl-adenosine-3'-phosphate
  modified_base 18: mod_base = OTHER; note = 2'-O-methyl-cytidine-3'-phosphate
  modified_base 19: mod_base = OTHER; note = 2'-O-methyl-uridine-3'-phosphorothioate
  modified_base 20: mod_base = OTHER; note = 2'-O-methyl-uridine-3'-phosphorothioate
  modified_base 21: mod_base = OTHER; note = 2'-O-methyl-uridine-3'-phosphate
ttattgagttagcaacacttt

SEQ ID NO: 2207 - RNA, 21 nt, synthetic construct
  source 1..21: mol_type = other RNA
  modified_base 1: mod_base = OTHER; note = 2'-O-methyl-uridine-3'-phosphorothioate
  modified_base 2: mod_base = OTHER; note = 2'-deoxy-2'-fluoro-cytidine-3'-phosphorothioate
  modified_base 3: mod_base = OTHER; note = 2'-O-methyl-uridine-3'-phosphate
  modified_base 4: mod_base = OTHER; note = 2'-O-methyl-adenosine-3'-phosphate
  modified_base 5: mod_base = OTHER; note = 2'-O-methyl-uridine-3'-phosphate
  modified_base 6: mod_base = OTHER; note = 2'-deoxy-2'-fluoro-uridine-3'-phosphate
  modified_base 7: mod_base = OTHER; note = 2'-O-methyl-guanosine-3'-phosphate
  modified_base 8: mod_base = OTHER; note = 2'-deoxy-2'-fluoro-adenosine-3'-phosphate
  modified_base 9: mod_base = OTHER; note = 2'-deoxy-2'-fluoro-guanosine-3'-phosphate
  modified_base 10: mod_base = OTHER; note = 2'-O-methyl-uridine-3'-phosphate
  modified_base 11: mod_base = OTHER; note = 2'-O-methyl-uridine-3'-phosphate
  modified_base 12: mod_base = OTHER; note = 2'-O-methyl-adenosine-3'-phosphate
  modified_base 13: mod_base = OTHER; note = 2'-O-methyl-guanosine-3'-phosphate
  modified_base 14: mod_base = OTHER; note = 2'-deoxy-2'-fluoro-cytidine-3'-phosphate
  modified_base 15: mod_base = OTHER; note = 2'-O-methyl-adenosine-3'-phosphate
  modified_base 16: mod_base = OTHER; note = 2'-deoxy-2'-fluoro-adenosine-3'-phosphate
  modified_base 17: mod_base = OTHER; note = 2'-O-methyl-cytidine-3'-phosphate
  modified_base 18: mod_base = OTHER; note = 2'-O-methyl-adenosine-3'-phosphate
  modified_base 19: mod_base = OTHER; note = 2'-O-methyl-cytidine-3'-phosphorothioate
  modified_base 20: mod_base = OTHER; note = 2'-O-methyl-uridine-3'-phosphorothioate
  modified_base 21: mod_base = OTHER; note = 2'-O-methyl-uridine-3'-phosphate
tctattgagttagcaacactt

SEQ ID NO: 2208 - RNA, 21 nt, synthetic construct
  source 1..21: mol_type = other RNA
  modified_base 1: mod_base = OTHER; note = 2'-O-methyl-uridine-3'-phosphorothioate
  modified_base 2: mod_base = OTHER; note = 2'-deoxy-2'-fluoro-adenosine-3'-phosphorothioate
  modified_base 3: mod_base = OTHER; note = 2'-O-methyl-cytidine-3'-phosphate
  modified_base 4: mod_base = OTHER; note = 2'-O-methyl-uridine-3'-phosphate
  modified_base 5: mod_base = OTHER; note = 2'-O-methyl-adenosine-3'-phosphate
  modified_base 6: mod_base = OTHER; note = 2'-deoxy-2'-fluoro-uridine-3'-phosphate
  modified_base 7: mod_base = OTHER; note = 2'-O-methyl-uridine-3'-phosphate
  modified_base 8: mod_base = OTHER; note = 2'-deoxy-2'-fluoro-guanosine-3'-phosphate
  modified_base 9: mod_base = OTHER; note = 2'-deoxy-2'-fluoro-adenosine-3'-phosphate
  modified_base 10: mod_base = OTHER; note = 2'-O-methyl-guanosine-3'-phosphate
  modified_base 11: mod_base = OTHER; note = 2'-O-methyl-uridine-3'-phosphate
  modified_base 12: mod_base = OTHER; note = 2'-O-methyl-uridine-3'-phosphate
  modified_base 13: mod_base = OTHER; note = 2'-O-methyl-adenosine-3'-phosphate
  modified_base 14: mod_base = OTHER; note = 2'-deoxy-2'-fluoro-guanosine-3'-phosphate
  modified_base 15: mod_base = OTHER; note = 2'-O-methyl-cytidine-3'-phosphate
  modified_base 16: mod_base = OTHER; note = 2'-deoxy-2'-fluoro-adenosine-3'-phosphate
  modified_base 17: mod_base = OTHER; note = 2'-O-methyl-adenosine-3'-phosphate
  modified_base 18: mod_base = OTHER; note = 2'-O-methyl-cytidine-3'-phosphate
  modified_base 19: mod_base = OTHER; note = 2'-O-methyl-adenosine-3'-phosphorothioate
  modified_base 20: mod_base = OTHER; note = 2'-O-methyl-uridine-3'-phosphorothioate
  modified_base 21: mod_base = OTHER; note = 2'-O-methyl-uridine-3'-phosphate
tactattgagttagcaacatt

SEQ ID NO: 2209 - RNA, 21 nt, synthetic construct
  source 1..21: mol_type = other RNA
  modified_base 1: mod_base = OTHER; note = 2'-O-methyl-uridine-3'-phosphorothioate
  modified_base 2: mod_base = OTHER; note = 2'-deoxy-2'-fluoro-uridine-3'-phosphorothioate
  modified_base 3: mod_base = OTHER; note = 2'-O-methyl-cytidine-3'-phosphate
  modified_base 4: mod_base = OTHER; note = 2'-O-methyl-adenosine-3'-phosphate
  modified_base 5: mod_base = OTHER; note = 2'-O-methyl-cytidine-3'-phosphate
  modified_base 6: mod_base = OTHER; note = 2'-deoxy-2'-fluoro-uridine-3'-phosphate
  modified_base 7: mod_base = OTHER; note = 2'-O-methyl-adenosine-3'-phosphate
  modified_base 8: mod_base = OTHER; note = 2'-deoxy-2'-fluoro-uridine-3'-phosphate
  modified_base 9: mod_base = OTHER; note = 2'-deoxy-2'-fluoro-uridine-3'-phosphate
  modified_base 10: mod_base = OTHER; note = 2'-O-methyl-guanosine-3'-phosphate
  modified_base 11: mod_base = OTHER; note = 2'-O-methyl-adenosine-3'-phosphate
  modified_base 12: mod_base = OTHER; note = 2'-O-methyl-guanosine-3'-phosphate
  modified_base 13: mod_base = OTHER; note = 2'-O-methyl-uridine-3'-phosphate
  modified_base 14: mod_base = OTHER; note = 2'-deoxy-2'-fluoro-uridine-3'-phosphate
  modified_base 15: mod_base = OTHER; note = 2'-O-methyl-adenosine-3'-phosphate
  modified_base 16: mod_base = OTHER; note = 2'-deoxy-2'-fluoro-guanosine-3'-phosphate
  modified_base 17: mod_base = OTHER; note = 2'-O-methyl-cytidine-3'-phosphate
  modified_base 18: mod_base = OTHER; note = 2'-O-methyl-adenosine-3'-phosphate
  modified_base 19: mod_base = OTHER; note = 2'-O-methyl-adenosine-3'-phosphorothioate
  modified_base 20: mod_base = OTHER; note = 2'-O-methyl-uridine-3'-phosphorothioate
  modified_base 21: mod_base = OTHER; note = 2'-O-methyl-uridine-3'-phosphate
ttcactattgagttagcaatt

SEQ ID NO: 2210 - RNA, 21 nt, synthetic construct
  source 1..21: mol_type = other RNA
  modified_base 1: mod_base = OTHER; note = 2'-O-methyl-uridine-3'-phosphorothioate
  modified_base 2: mod_base = OTHER; note = 2'-deoxy-2'-fluoro-uridine-3'-phosphorothioate
  modified_base 3: mod_base = OTHER; note = 2'-O-methyl-uridine-3'-phosphate
  modified_base 4: mod_base = OTHER; note = 2'-O-methyl-cytidine-3'-phosphate
  modified_base 5: mod_base = OTHER; note = 2'-O-methyl-adenosine-3'-phosphate
  modified_base 6: mod_base = OTHER; note = 2'-deoxy-2'-fluoro-cytidine-3'-phosphate
  modified_base 7: mod_base = OTHER; note = 2'-O-methyl-uridine-3'-phosphate
  modified_base 8: mod_base = OTHER; note = 2'-deoxy-2'-fluoro-adenosine-3'-phosphate
  modified_base 9: mod_base = OTHER; note = 2'-deoxy-2'-fluoro-uridine-3'-phosphate
  modified_base 10: mod_base = OTHER; note = 2'-O-methyl-uridine-3'-phosphate
  modified_base 11: mod_base = OTHER; note = 2'-O-methyl-guanosine-3'-phosphate
  modified_base 12: mod_base = OTHER; note = 2'-O-methyl-adenosine-3'-phosphate
  modified_base 13: mod_base = OTHER; note = 2'-O-methyl-guanosine-3'-phosphate
  modified_base 14: mod_base = OTHER; note = 2'-deoxy-2'-fluoro-uridine-3'-phosphate
  modified_base 15: mod_base = OTHER; note = 2'-O-methyl-uridine-3'-phosphate
  modified_base 16: mod_base = OTHER; note = 2'-deoxy-2'-fluoro-adenosine-3'-phosphate
  modified_base 17: mod_base = OTHER; note = 2'-O-methyl-guanosine-3'-phosphate
  modified_base 18: mod_base = OTHER; note = 2'-O-methyl-cytidine-3'-phosphate
  modified_base 19: mod_base = OTHER; note = 2'-O-methyl-adenosine-3'-phosphorothioate
  modified_base 20: mod_base = OTHER; note = 2'-O-methyl-uridine-3'-phosphorothioate
  modified_base 21: mod_base = OTHER; note = 2'-O-methyl-uridine-3'-phosphate
tttcactattgagttagcatt

SEQ ID NO: 2211 - RNA, 21 nt, synthetic construct
  source 1..21: mol_type = other RNA
  modified_base 1: mod_base = OTHER; note = 2'-O-methyl-uridine-3'-phosphorothioate
  modified_base 2: mod_base = OTHER; note = 2'-deoxy-2'-fluoro-cytidine-3'-phosphorothioate
  modified_base 3: mod_base = OTHER; note = 2'-O-methyl-uridine-3'-phosphate
  modified_base 4: mod_base = OTHER; note = 2'-O-methyl-cytidine-3'-phosphate
  modified_base 5: mod_base = OTHER; note = 2'-O-methyl-cytidine-3'-phosphate
  modified_base 6: mod_base = OTHER; note = 2'-deoxy-2'-fluoro-uridine-3'-phosphate
  modified_base 7: mod_base = OTHER; note = 2'-O-methyl-uridine-3'-phosphate
  modified_base 8: mod_base = OTHER; note = 2'-deoxy-2'-fluoro-cytidine-3'-phosphate
  modified_base 9: mod_base = OTHER; note = 2'-deoxy-2'-fluoro-adenosine-3'-phosphate
  modified_base 10: mod_base = OTHER; note = 2'-O-methyl-cytidine-3'-phosphate
  modified_base 11: mod_base = OTHER; note = 2'-O-methyl-uridine-3'-phosphate
  modified_base 12: mod_base = OTHER; note = 2'-O-methyl-adenosine-3'-phosphate
  modified_base 13: mod_base = OTHER; note = 2'-O-methyl-uridine-3'-phosphate
  modified_base 14: mod_base = OTHER; note = 2'-deoxy-2'-fluoro-uridine-3'-phosphate
  modified_base 15: mod_base = OTHER; note = 2'-O-methyl-guanosine-3'-phosphate
  modified_base 16: mod_base = OTHER; note = 2'-deoxy-2'-fluoro-adenosine-3'-phosphate
  modified_base 17: mod_base = OTHER; note = 2'-O-methyl-guanosine-3'-phosphate
  modified_base 18: mod_base = OTHER; note = 2'-O-methyl-uridine-3'-phosphate
  modified_base 19: mod_base = OTHER; note = 2'-O-methyl-uridine-3'-phosphorothioate
  modified_base 20: mod_base = OTHER; note = 2'-O-methyl-uridine-3'-phosphorothioate
  modified_base 21: mod_base = OTHER; note = 2'-O-methyl-uridine-3'-phosphate
tctccttcactattgagtttt

SEQ ID NO: 2212 - RNA, 21 nt, synthetic construct
  source 1..21: mol_type = other RNA
  modified_base 1: mod_base = OTHER; note = 2'-O-methyl-uridine-3'-phosphorothioate
  modified_base 2: mod_base = OTHER; note = 2'-deoxy-2'-fluoro-guanosine-3'-phosphorothioate
  modified_base 3: mod_base = OTHER; note = 2'-O-methyl-uridine-3'-phosphate
  modified_base 4: mod_base = OTHER; note = 2'-O-methyl-cytidine-3'-phosphate
  modified_base 5: mod_base = OTHER; note = 2'-O-methyl-uridine-3'-phosphate
  modified_base 6: mod_base = OTHER; note = 2'-deoxy-2'-fluoro-cytidine-3'-phosphate
  modified_base 7: mod_base = OTHER; note = 2'-O-methyl-cytidine-3'-phosphate
  modified_base 8: mod_base = OTHER; note = 2'-deoxy-2'-fluoro-uridine-3'-phosphate
  modified_base 9: mod_base = OTHER; note = 2'-deoxy-2'-fluoro-uridine-3'-phosphate
  modified_base 10: mod_base = OTHER; note = 2'-O-methyl-cytidine-3'-phosphate
  modified_base 11: mod_base = OTHER; note = 2'-O-methyl-adenosine-3'-phosphate
  modified_base 12: mod_base = OTHER; note = 2'-O-methyl-cytidine-3'-phosphate
  modified_base 13: mod_base = OTHER; note = 2'-O-methyl-uridine-3'-phosphate
  modified_base 14: mod_base = OTHER; note = 2'-deoxy-2'-fluoro-adenosine-3'-phosphate
  modified_base 15: mod_base = OTHER; note = 2'-O-methyl-uridine-3'-phosphate
  modified_base 16: mod_base = OTHER; note = 2'-deoxy-2'-fluoro-uridine-3'-phosphate
  modified_base 17: mod_base = OTHER; note = 2'-O-methyl-guanosine-3'-phosphate
  modified_base 18: mod_base = OTHER; note = 2'-O-methyl-adenosine-3'-phosphate
  modified_base 19: mod_base = OTHER; note = 2'-O-methyl-guanosine-3'-phosphorothioate
  modified_base 20: mod_base = OTHER; note = 2'-O-methyl-uridine-3'-phosphorothioate
  modified_base 21: mod_base = OTHER; note = 2'-O-methyl-uridine-3'-phosphate
tgtctccttcactattgagtt

SEQ ID NO: 2213 - RNA, 21 nt, synthetic construct
  source 1..21: mol_type = other RNA
  modified_base 1: mod_base = OTHER; note = 2'-O-methyl-uridine-3'-phosphorothioate
  modified_base 2: mod_base = OTHER; note = 2'-deoxy-2'-fluoro-uridine-3'-phosphorothioate
  modified_base 3: mod_base = OTHER; note = 2'-O-methyl-guanosine-3'-phosphate
  modified_base 4: mod_base = OTHER; note = 2'-O-methyl-adenosine-3'-phosphate
  modified_base 5: mod_base = OTHER; note = 2'-O-methyl-adenosine-3'-phosphate
  modified_base 6: mod_base = OTHER; note = 2'-deoxy-2'-fluoro-cytidine-3'-phosphate
  modified_base 7: mod_base = OTHER; note = 2'-O-methyl-cytidine-3'-phosphate
  modified_base 8: mod_base = OTHER; note = 2'-deoxy-2'-fluoro-adenosine-3'-phosphate
  modified_base 9: mod_base = OTHER; note = 2'-deoxy-2'-fluoro-adenosine-3'-phosphate
  modified_base 10: mod_base = OTHER; note = 2'-O-methyl-adenosine-3'-phosphate
  modified_base 11: mod_base = OTHER; note = 2'-O-methyl-cytidine-3'-phosphate
  modified_base 12: mod_base = OTHER; note = 2'-O-methyl-adenosine-3'-phosphate
  modified_base 13: mod_base = OTHER; note = 2'-O-methyl-cytidine-3'-phosphate
  modified_base 14: mod_base = OTHER; note = 2'-deoxy-2'-fluoro-uridine-3'-phosphate
  modified_base 15: mod_base = OTHER; note = 2'-O-methyl-uridine-3'-phosphate
  modified_base 16: mod_base = OTHER; note = 2'-deoxy-2'-fluoro-uridine-3'-phosphate
  modified_base 17: mod_base = OTHER; note = 2'-O-methyl-cytidine-3'-phosphate
  modified_base 18: mod_base = OTHER; note = 2'-O-methyl-cytidine-3'-phosphate
  modified_base 19: mod_base = OTHER; note = 2'-O-methyl-adenosine-3'-phosphorothioate
  modified_base 20: mod_base = OTHER; note = 2'-O-methyl-uridine-3'-phosphorothioate
  modified_base 21: mod_base = OTHER; note = 2'-O-methyl-uridine-3'-phosphate
ttgaaccaaacactttccatt

SEQ ID NO: 2214 - RNA, 21 nt, synthetic construct
  source 1..21: mol_type = other RNA
  modified_base 1: mod_base = OTHER; note = 2'-O-methyl-uridine-3'-phosphorothioate
  modified_base 2: mod_base = OTHER; note = 2'-deoxy-2'-fluoro-adenosine-3'-phosphorothioate
  modified_base 3: mod_base = OTHER; note = 2'-O-methyl-guanosine-3'-phosphate
  modified_base 4: mod_base = OTHER; note = 2'-O-methyl-adenosine-3'-phosphate
  modified_base 5: mod_base = OTHER; note = 2'-O-methyl-uridine-3'-phosphate
  modified_base 6: mod_base = OTHER; note = 2'-deoxy-2'-fluoro-adenosine-3'-phosphate
  modified_base 7: mod_base = OTHER; note = 2'-O-methyl-uridine-3'-phosphate
  modified_base 8: mod_base = OTHER; note = 2'-deoxy-2'-fluoro-cytidine-3'-phosphate
  modified_base 9: mod_base = OTHER; note = 2'-deoxy-2'-fluoro-cytidine-3'-phosphate
  modified_base 10: mod_base = OTHER; note = 2'-O-methyl-cytidine-3'-phosphate
  modified_base 11: mod_base = OTHER; note = 2'-O-methyl-uridine-3'-phosphate
  modified_base 12: mod_base = OTHER; note = 2'-O-methyl-guanosine-3'-phosphate
  modified_base 13: mod_base = OTHER; note = 2'-O-methyl-adenosine-3'-phosphate
  modified_base 14: mod_base = OTHER; note = 2'-deoxy-2'-fluoro-adenosine-3'-phosphate
  modified_base 15: mod_base = OTHER; note = 2'-O-methyl-cytidine-3'-phosphate
  modified_base 16: mod_base = OTHER; note = 2'-deoxy-2'-fluoro-cytidine-3'-phosphate
  modified_base 17: mod_base = OTHER; note = 2'-O-methyl-adenosine-3'-phosphate
  modified_base 18: mod_base = OTHER; note = 2'-O-methyl-adenosine-3'-phosphate
  modified_base 19: mod_base = OTHER; note = 2'-O-methyl-adenosine-3'-phosphorothioate
  modified_base 20: mod_base = OTHER; note = 2'-O-methyl-uridine-3'-phosphorothioate
  modified_base 21: mod_base = OTHER; note = 2'-O-methyl-uridine-3'-phosphate
tagatatccctgaaccaaatt

SEQ ID NO: 2215 - RNA, 21 nt, synthetic construct
  source 1..21: mol_type = other RNA
  modified_base 1: mod_base = OTHER; note = 2'-O-methyl-uridine-3'-phosphorothioate
  modified_base 2: mod_base = OTHER; note = 2'-deoxy-2'-fluoro-cytidine-3'-phosphorothioate
  modified_base 3: mod_base = OTHER; note = 2'-O-methyl-adenosine-3'-phosphate
  modified_base 4: mod_base = OTHER; note = 2'-O-methyl-guanosine-3'-phosphate
  modified_base 5: mod_base = OTHER; note = 2'-O-methyl-adenosine-3'-phosphate
  modified_base 6: mod_base = OTHER; note = 2'-deoxy-2'-fluoro-uridine-3'-phosphate
  modified_base 7: mod_base = OTHER; note = 2'-O-methyl-adenosine-3'-phosphate
  modified_base 8: mod_base = OTHER; note = 2'-deoxy-2'-fluoro-uridine-3'-phosphate
  modified_base 9: mod_base = OTHER; note = 2'-deoxy-2'-fluoro-cytidine-3'-phosphate
  modified_base 10: mod_base = OTHER; note = 2'-O-methyl-cytidine-3'-phosphate
  modified_base 11: mod_base = OTHER; note = 2'-O-methyl-cytidine-3'-phosphate
  modified_base 12: mod_base = OTHER; note = 2'-O-methyl-uridine-3'-phosphate
  modified_base 13: mod_base = OTHER; note = 2'-O-methyl-guanosine-3'-phosphate
  modified_base 14: mod_base = OTHER; note = 2'-deoxy-2'-fluoro-adenosine-3'-phosphate
  modified_base 15: mod_base = OTHER; note = 2'-O-methyl-adenosine-3'-phosphate
  modified_base 16: mod_base = OTHER; note = 2'-deoxy-2'-fluoro-cytidine-3'-phosphate
  modified_base 17: mod_base = OTHER; note = 2'-O-methyl-cytidine-3'-phosphate
  modified_base 18: mod_base = OTHER; note = 2'-O-methyl-adenosine-3'-phosphate
  modified_base 19: mod_base = OTHER; note = 2'-O-methyl-adenosine-3'-phosphorothioate
  modified_base 20: mod_base = OTHER; note = 2'-O-methyl-uridine-3'-phosphorothioate
  modified_base 21: mod_base = OTHER; note = 2'-O-methyl-uridine-3'-phosphate
tcagatatccctgaaccaatt

SEQ ID NO: 2216 - RNA, 21 nt, synthetic construct
  source 1..21: mol_type = other RNA
  modified_base 1: mod_base = OTHER; note = 2'-O-methyl-uridine-3'-phosphorothioate
  modified_base 2: mod_base = OTHER; note = 2'-deoxy-2'-fluoro-cytidine-3'-phosphorothioate
  modified_base 3: mod_base = OTHER; note = 2'-O-methyl-adenosine-3'-phosphate
  modified_base 4: mod_base = OTHER; note = 2'-O-methyl-cytidine-3'-phosphate
  modified_base 5: mod_base = OTHER; note = 2'-O-methyl-uridine-3'-phosphate
  modified_base 6: mod_base = OTHER; note = 2'-deoxy-2'-fluoro-uridine-3'-phosphate
  modified_base 7: mod_base = OTHER; note = 2'-O-methyl-adenosine-3'-phosphate
  modified_base 8: mod_base = OTHER; note = 2'-deoxy-2'-fluoro-adenosine-3'-phosphate
  modified_base 9: mod_base = OTHER; note = 2'-deoxy-2'-fluoro-guanosine-3'-phosphate
  modified_base 10: mod_base = OTHER; note = 2'-O-methyl-adenosine-3'-phosphate
  modified_base 11: mod_base = OTHER; note = 2'-O-methyl-adenosine-3'-phosphate
  modified_base 12: mod_base = OTHER; note = 2'-O-methyl-adenosine-3'-phosphate
  modified_base 13: mod_base = OTHER; note = 2'-O-methyl-uridine-3'-phosphate
  modified_base 14: mod_base = OTHER; note = 2'-deoxy-2'-fluoro-cytidine-3'-phosphate
  modified_base 15: mod_base = OTHER; note = 2'-O-methyl-uridine-3'-phosphate
  modified_base 16: mod_base = OTHER; note = 2'-deoxy-2'-fluoro-cytidine-3'-phosphate
  modified_base 17: mod_base = OTHER; note = 2'-O-methyl-uridine-3'-phosphate
  modified_base 18: mod_base = OTHER; note = 2'-O-methyl-guanosine-3'-phosphate
  modified_base 19: mod_base = OTHER; note = 2'-O-methyl-cytidine-3'-phosphorothioate
  modified_base 20: mod_base = OTHER; note = 2'-O-methyl-uridine-3'-phosphorothioate
  modified_base 21: mod_base = OTHER; note = 2'-O-methyl-uridine-3'-phosphate
tcacttaagaaatctctgctt

SEQ ID NO: 2217 - RNA, 21 nt, synthetic construct
  source 1..21: mol_type = other RNA
  modified_base 1: mod_base = OTHER; note = 2'-O-methyl-uridine-3'-phosphorothioate
  modified_base 2: mod_base = OTHER; note = 2'-deoxy-2'-fluoro-uridine-3'-phosphorothioate
  modified_base 3: mod_base = OTHER; note = 2'-O-methyl-adenosine-3'-phosphate
  modified_base 4: mod_base = OTHER; note = 2'-O-methyl-guanosine-3'-phosphate
  modified_base 5: mod_base = OTHER; note = 2'-O-methyl-adenosine-3'-phosphate
  modified_base 6: mod_base = OTHER; note = 2'-deoxy-2'-fluoro-uridine-3'-phosphate
  modified_base 7: mod_base = OTHER; note = 2'-O-methyl-guanosine-3'-phosphate
  modified_base 8: mod_base = OTHER; note = 2'-deoxy-2'-fluoro-adenosine-3'-phosphate
  modified_base 9: mod_base = OTHER; note = 2'-deoxy-2'-fluoro-guanosine-3'-phosphate
  modified_base 10: mod_base = OTHER; note = 2'-O-methyl-guanosine-3'-phosphate
  modified_base 11: mod_base = OTHER; note = 2'-O-methyl-cytidine-3'-phosphate
  modified_base 12: mod_base = OTHER; note = 2'-O-methyl-guanosine-3'-phosphate
  modified_base 13: mod_base = OTHER; note = 2'-O-methyl-uridine-3'-phosphate
  modified_base 14: mod_base = OTHER; note = 2'-deoxy-2'-fluoro-cytidine-3'-phosphate
  modified_base 15: mod_base = OTHER; note = 2'-O-methyl-adenosine-3'-phosphate
  modified_base 16: mod_base = OTHER; note = 2'-deoxy-2'-fluoro-cytidine-3'-phosphate
  modified_base 17: mod_base = OTHER; note = 2'-O-methyl-uridine-3'-phosphate
  modified_base 18: mod_base = OTHER; note = 2'-O-methyl-uridine-3'-phosphate
  modified_base 19: mod_base = OTHER; note = 2'-O-methyl-adenosine-3'-phosphorothioate
  modified_base 20: mod_base = OTHER; note = 2'-O-methyl-uridine-3'-phosphorothioate
  modified_base 21: mod_base = OTHER; note = 2'-O-methyl-uridine-3'-phosphate
ttagatgaggcgtcacttatt

SEQ ID NO: 2218 - RNA, 21 nt, synthetic construct
  source 1..21: mol_type = other RNA
  modified_base 1: mod_base = OTHER; note = 2'-O-methyl-uridine-3'-phosphorothioate
  modified_base 2: mod_base = OTHER; note = 2'-deoxy-2'-fluoro-uridine-3'-phosphorothioate
  modified_base 3: mod_base = OTHER; note = 2'-O-methyl-guanosine-3'-phosphate
  modified_base 4: mod_base = OTHER; note = 2'-O-methyl-uridine-3'-phosphate
  modified_base 5: mod_base = OTHER; note = 2'-O-methyl-adenosine-3'-phosphate
  modified_base 6: mod_base = OTHER; note = 2'-deoxy-2'-fluoro-guanosine-3'-phosphate
  modified_base 7: mod_base = OTHER; note = 2'-O-methyl-adenosine-3'-phosphate
  modified_base 8: mod_base = OTHER; note = 2'-deoxy-2'-fluoro-uridine-3'-phosphate
  modified_base 9: mod_base = OTHER; note = 2'-deoxy-2'-fluoro-guanosine-3'-phosphate
  modified_base 10: mod_base = OTHER; note = 2'-O-methyl-adenosine-3'-phosphate
  modified_base 11: mod_base = OTHER; note = 2'-O-methyl-guanosine-3'-phosphate
  modified_base 12: mod_base = OTHER; note = 2'-O-methyl-guanosine-3'-phosphate
  modified_base 13: mod_base = OTHER; note = 2'-O-methyl-cytidine-3'-phosphate
  modified_base 14: mod_base = OTHER; note = 2'-deoxy-2'-fluoro-guanosine-3'-phosphate
  modified_base 15: mod_base = OTHER; note = 2'-O-methyl-uridine-3'-phosphate
  modified_base 16: mod_base = OTHER; note = 2'-deoxy-2'-fluoro-cytidine-3'-phosphate
  modified_base 17: mod_base = OTHER; note = 2'-O-methyl-adenosine-3'-phosphate
  modified_base 18: mod_base = OTHER; note = 2'-O-methyl-cytidine-3'-phosphate
  modified_base 19: mod_base = OTHER; note = 2'-O-methyl-uridine-3'-phosphorothioate
  modified_base 20: mod_base = OTHER; note = 2'-O-methyl-uridine-3'-phosphorothioate
  modified_base 21: mod_base = OTHER; note = 2'-O-methyl-uridine-3'-phosphate
ttgtagatgaggcgtcacttt

SEQ ID NO: 2219 - RNA, 21 nt, synthetic construct
  source 1..21: mol_type = other RNA
  modified_base 1: mod_base = OTHER; note = 2'-O-methyl-uridine-3'-phosphorothioate
  modified_base 2: mod_base = OTHER; note = 2'-deoxy-2'-fluoro-guanosine-3'-phosphorothioate
  modified_base 3: mod_base = OTHER; note = 2'-O-methyl-cytidine-3'-phosphate
  modified_base 4: mod_base = OTHER; note = 2'-O-methyl-uridine-3'-phosphate
  modified_base 5: mod_base = OTHER; note = 2'-O-methyl-uridine-3'-phosphate
  modified_base 6: mod_base = OTHER; note = 2'-deoxy-2'-fluoro-guanosine-3'-phosphate
  modified_base 7: mod_base = OTHER; note = 2'-O-methyl-uridine-3'-phosphate
  modified_base 8: mod_base = OTHER; note = 2'-deoxy-2'-fluoro-adenosine-3'-phosphate
  modified_base 9: mod_base = OTHER; note = 2'-deoxy-2'-fluoro-guanosine-3'-phosphate
  modified_base 10: mod_base = OTHER; note = 2'-O-methyl-adenosine-3'-phosphate
  modified_base 11: mod_base = OTHER; note = 2'-O-methyl-uridine-3'-phosphate
  modified_base 12: mod_base = OTHER; note = 2'-O-methyl-guanosine-3'-phosphate
  modified_base 13: mod_base = OTHER; note = 2'-O-methyl-adenosine-3'-phosphate
  modified_base 14: mod_base = OTHER; note = 2'-deoxy-2'-fluoro-guanosine-3'-phosphate
  modified_base 15: mod_base = OTHER; note = 2'-O-methyl-guanosine-3'-phosphate
  modified_base 16: mod_base = OTHER; note = 2'-deoxy-2'-fluoro-cytidine-3'-phosphate
  modified_base 17: mod_base = OTHER; note = 2'-O-methyl-guanosine-3'-phosphate
  modified_base 18: mod_base = OTHER; note = 2'-O-methyl-uridine-3'-phosphate
  modified_base 19: mod_base = OTHER; note = 2'-O-methyl-cytidine-3'-phosphorothioate
  modified_base 20: mod_base = OTHER; note = 2'-O-methyl-uridine-3'-phosphorothioate
  modified_base 21: mod_base = OTHER; note = 2'-O-methyl-uridine-3'-phosphate
tgcttgtagatgaggcgtctt

SEQ ID NO: 2220 - RNA, 21 nt, synthetic construct
  source 1..21: mol_type = other RNA
  modified_base 1: mod_base = OTHER; note = 2'-O-methyl-uridine-3'-phosphorothioate
  modified_base 2: mod_base = OTHER; note = 2'-deoxy-2'-fluoro-uridine-3'-phosphorothioate
  modified_base 3: mod_base = OTHER; note = 2'-O-methyl-uridine-3'-phosphate
  modified_base 4: mod_base = OTHER; note = 2'-O-methyl-uridine-3'-phosphate
  modified_base 5: mod_base = OTHER; note = 2'-O-methyl-cytidine-3'-phosphate
  modified_base 6: mod_base = OTHER; note = 2'-deoxy-2'-fluoro-cytidine-3'-phosphate
  modified_base 7: mod_base = OTHER; note = 2'-O-methyl-adenosine-3'-phosphate
  modified_base 8: mod_base = OTHER; note = 2'-deoxy-2'-fluoro-guanosine-3'-phosphate
  modified_base 9: mod_base = OTHER; note = 2'-deoxy-2'-fluoro-cytidine-3'-phosphate
  modified_base 10: mod_base = OTHER; note = 2'-O-methyl-uridine-3'-phosphate
  modified_base 11: mod_base = OTHER; note = 2'-O-methyl-uridine-3'-phosphate
  modified_base 12: mod_base = OTHER; note = 2'-O-methyl-guanosine-3'-phosphate
  modified_base 13: mod_base = OTHER; note = 2'-O-methyl-uridine-3'-phosphate
  modified_base 14: mod_base = OTHER; note = 2'-deoxy-2'-fluoro-adenosine-3'-phosphate
  modified_base 15: mod_base = OTHER; note = 2'-O-methyl-guanosine-3'-phosphate
  modified_base 16: mod_base = OTHER; note = 2'-deoxy-2'-fluoro-adenosine-3'-phosphate
  modified_base 17: mod_base = OTHER; note = 2'-O-methyl-uridine-3'-phosphate
  modified_base 18: mod_base = OTHER; note = 2'-O-methyl-guanosine-3'-phosphate
  modified_base 19: mod_base = OTHER; note = 2'-O-methyl-adenosine-3'-phosphorothioate
  modified_base 20: mod_base = OTHER; note = 2'-O-methyl-uridine-3'-phosphorothioate
  modified_base 21: mod_base = OTHER; note = 2'-O-methyl-uridine-3'-phosphate
ttttccagcttgtagatgatt

SEQ ID NO: 2221 - RNA, 21 nt, synthetic construct
  source 1..21: mol_type = other RNA
  modified_base 1: mod_base = OTHER; note = 2'-O-methyl-uridine-3'-phosphorothioate
  modified_base 2: mod_base = OTHER; note = 2'-deoxy-2'-fluoro-adenosine-3'-phosphorothioate
  modified_base 3: mod_base = OTHER; note = 2'-O-methyl-uridine-3'-phosphate
  modified_base 4: mod_base = OTHER; note = 2'-O-methyl-uridine-3'-phosphate
  modified_base 5: mod_base = OTHER; note = 2'-O-methyl-guanosine-3'-phosphate
  modified_base 6: mod_base = OTHER; note = 2'-deoxy-2'-fluoro-uridine-3'-phosphate
  modified_base 7: mod_base = OTHER; note = 2'-O-methyl-adenosine-3'-phosphate
  modified_base 8: mod_base = OTHER; note = 2'-deoxy-2'-fluoro-adenosine-3'-phosphate
  modified_base 9: mod_base = OTHER; note = 2'-deoxy-2'-fluoro-cytidine-3'-phosphate
  modified_base 10: mod_base = OTHER; note = 2'-O-methyl-adenosine-3'-phosphate
  modified_base 11: mod_base = OTHER; note = 2'-O-methyl-adenosine-3'-phosphate
  modified_base 12: mod_base = OTHER; note = 2'-O-methyl-adenosine-3'-phosphate
  modified_base 13: mod_base = OTHER; note = 2'-O-methyl-cytidine-3'-phosphate
  modified_base 14: mod_base = OTHER; note = 2'-deoxy-2'-fluoro-adenosine-3'-phosphate
  modified_base 15: mod_base = OTHER; note = 2'-O-methyl-guanosine-3'-phosphate
  modified_base 16: mod_base = OTHER; note = 2'-deoxy-2'-fluoro-uridine-3'-phosphate
  modified_base 17: mod_base = OTHER; note = 2'-O-methyl-guanosine-3'-phosphate
  modified_base 18: mod_base = OTHER; note = 2'-O-methyl-uridine-3'-phosphate
  modified_base 19: mod_base = OTHER; note = 2'-O-methyl-adenosine-3'-phosphorothioate
  modified_base 20: mod_base = OTHER; note = 2'-O-methyl-uridine-3'-phosphorothioate
  modified_base 21: mod_base = OTHER; note = 2'-O-methyl-uridine-3'-phosphate
tattgtaacaaacagtgtatt

SEQ ID NO: 2222 - RNA, 21 nt, synthetic construct
  source 1..21: mol_type = other RNA
  modified_base 1: mod_base = OTHER; note = 2'-O-methyl-uridine-3'-phosphorothioate
  modified_base 2: mod_base = OTHER; note = 2'-deoxy-2'-fluoro-adenosine-3'-phosphorothioate
  modified_base 3: mod_base = OTHER; note = 2'-O-methyl-uridine-3'-phosphate
  modified_base 4: mod_base = OTHER; note = 2'-O-methyl-cytidine-3'-phosphate
  modified_base 5: mod_base = OTHER; note = 2'-O-methyl-cytidine-3'-phosphate
  modified_base 6: mod_base = OTHER; note = 2'-deoxy-2'-fluoro-uridine-3'-phosphate
  modified_base 7: mod_base = OTHER; note = 2'-O-methyl-cytidine-3'-phosphate
  modified_base 8: mod_base = OTHER; note = 2'-deoxy-2'-fluoro-adenosine-3'-phosphate
  modified_base 9: mod_base = OTHER; note = 2'-deoxy-2'-fluoro-cytidine-3'-phosphate
  modified_base 10: mod_base = OTHER; note = 2'-O-methyl-adenosine-3'-phosphate
  modified_base 11: mod_base = OTHER; note = 2'-O-methyl-guanosine-3'-phosphate
  modified_base 12: mod_base = OTHER; note = 2'-O-methyl-adenosine-3'-phosphate
  modified_base 13: mod_base = OTHER; note = 2'-O-methyl-adenosine-3'-phosphate
  modified_base 14: mod_base = OTHER; note = 2'-deoxy-2'-fluoro-uridine-3'-phosphate
  modified_base 15: mod_base = OTHER; note = 2'-O-methyl-adenosine-3'-phosphate
  modified_base 16: mod_base = OTHER; note = 2'-deoxy-2'-fluoro-adenosine-3'-phosphate
  modified_base 17: mod_base = OTHER; note = 2'-O-methyl-guanosine-3'-phosphate
  modified_base 18: mod_base = OTHER; note = 2'-O-methyl-adenosine-3'-phosphate
  modified_base 19: mod_base = OTHER; note = 2'-O-methyl-uridine-3'-phosphorothioate
  modified_base 20: mod_base = OTHER; note = 2'-O-methyl-uridine-3'-phosphorothioate
  modified_base 21: mod_base = OTHER; note = 2'-O-methyl-uridine-3'-phosphate
tatcctcacagaataagattt

SEQ ID NO: 2223 - RNA, 21 nt, synthetic construct
  source 1..21: mol_type = other RNA
  modified_base 1: mod_base = OTHER; note = 2'-O-methyl-uridine-3'-phosphorothioate
  modified_base 2: mod_base = OTHER; note = 2'-deoxy-2'-fluoro-guanosine-3'-phosphorothioate
  modified_base 3: mod_base = OTHER; note = 2'-O-methyl-uridine-3'-phosphate
  modified_base 4: mod_base = OTHER; note = 2'-O-methyl-uridine-3'-phosphate
  modified_base 5: mod_base = OTHER; note = 2'-O-methyl-adenosine-3'-phosphate
  modified_base 6: mod_base = OTHER; note = 2'-deoxy-2'-fluoro-uridine-3'-phosphate
  modified_base 7: mod_base = OTHER; note = 2'-O-methyl-adenosine-3'-phosphate
  modified_base 8: mod_base = OTHER; note = 2'-deoxy-2'-fluoro-guanosine-3'-phosphate
  modified_base 9: mod_base = OTHER; note = 2'-deoxy-2'-fluoro-uridine-3'-phosphate
  modified_base 10: mod_base = OTHER; note = 2'-O-methyl-adenosine-3'-phosphate
  modified_base 11: mod_base = OTHER; note = 2'-O-methyl-uridine-3'-phosphate
  modified_base 12: mod_base = OTHER; note = 2'-O-methyl-uridine-3'-phosphate
  modified_base 13: mod_base = OTHER; note = 2'-O-methyl-cytidine-3'-phosphate
  modified_base 14: mod_base = OTHER; note = 2'-deoxy-2'-fluoro-uridine-3'-phosphate
  modified_base 15: mod_base = OTHER; note = 2'-O-methyl-guanosine-3'-phosphate
  modified_base 16: mod_base = OTHER; note = 2'-deoxy-2'-fluoro-uridine-3'-phosphate
  modified_base 17: mod_base = OTHER; note = 2'-O-methyl-adenosine-3'-phosphate
  modified_base 18: mod_base = OTHER; note = 2'-O-methyl-adenosine-3'-phosphate
  modified_base 19: mod_base = OTHER; note = 2'-O-methyl-uridine-3'-phosphorothioate
  modified_base 20: mod_base = OTHER; note = 2'-O-methyl-uridine-3'-phosphorothioate
  modified_base 21: mod_base = OTHER; note = 2'-O-methyl-uridine-3'-phosphate
tgttatagtattctgtaattt

SEQ ID NO: 2224 - RNA, 21 nt, synthetic construct
  source 1..21: mol_type = other RNA
  modified_base 1: mod_base = OTHER; note = 2'-O-methyl-uridine-3'-phosphorothioate
  modified_base 2: mod_base = OTHER; note = 2'-deoxy-2'-fluoro-uridine-3'-phosphorothioate
  modified_base 3: mod_base = OTHER; note = 2'-O-methyl-guanosine-3'-phosphate
  modified_base 4: mod_base = OTHER; note = 2'-O-methyl-adenosine-3'-phosphate
  modified_base 5: mod_base = OTHER; note = 2'-O-methyl-guanosine-3'-phosphate
  modified_base 6: mod_base = OTHER; note = 2'-deoxy-2'-fluoro-uridine-3'-phosphate
  modified_base 7: mod_base = OTHER; note = 2'-O-methyl-uridine-3'-phosphate
  modified_base 8: mod_base = OTHER; note = 2'-deoxy-2'-fluoro-adenosine-3'-phosphate
  modified_base 9: mod_base = OTHER; note = 2'-deoxy-2'-fluoro-uridine-3'-phosphate
  modified_base 10: mod_base = OTHER; note = 2'-O-methyl-adenosine-3'-phosphate
  modified_base 11: mod_base = OTHER; note = 2'-O-methyl-guanosine-3'-phosphate
  modified_base 12: mod_base = OTHER; note = 2'-O-methyl-uridine-3'-phosphate
  modified_base 13: mod_base = OTHER; note = 2'-O-methyl-adenosine-3'-phosphate
  modified_base 14: mod_base = OTHER; note = 2'-deoxy-2'-fluoro-uridine-3'-phosphate
  modified_base 15: mod_base = OTHER; note = 2'-O-methyl-uridine-3'-phosphate
  modified_base 16: mod_base = OTHER; note = 2'-deoxy-2'-fluoro-cytidine-3'-phosphate
  modified_base 17: mod_base = OTHER; note = 2'-O-methyl-uridine-3'-phosphate
  modified_base 18: mod_base = OTHER; note = 2'-O-methyl-guanosine-3'-phosphate
  modified_base 19: mod_base = OTHER; note = 2'-O-methyl-uridine-3'-phosphorothioate
  modified_base 20: mod_base = OTHER; note = 2'-O-methyl-uridine-3'-phosphorothioate
  modified_base 21: mod_base = OTHER; note = 2'-O-methyl-uridine-3'-phosphate
ttgagttatagtattctgttt

SEQ ID NO: 2225 - RNA, 21 nt, synthetic construct
  source 1..21: mol_type = other RNA
  modified_base 1: mod_base = OTHER; note = 2'-O-methyl-uridine-3'-phosphorothioate
  modified_base 2: mod_base = OTHER; note = 2'-deoxy-2'-fluoro-adenosine-3'-phosphorothioate
  modified_base 3: mod_base = OTHER; note = 2'-O-methyl-uridine-3'-phosphate
  modified_base 4: mod_base = OTHER; note = 2'-O-methyl-adenosine-3'-phosphate
  modified_base 5: mod_base = OTHER; note = 2'-O-methyl-uridine-3'-phosphate
  modified_base 6: mod_base = OTHER; note = 2'-deoxy-2'-fluoro-adenosine-3'-phosphate
  modified_base 7: mod_base = OTHER; note = 2'-O-methyl-guanosine-3'-phosphate
  modified_base 8: mod_base = OTHER; note = 2'-deoxy-2'-fluoro-uridine-3'-phosphate
  modified_base 9: mod_base = OTHER; note = 2'-deoxy-2'-fluoro-guanosine-3'-phosphate
  modified_base 10: mod_base = OTHER; note = 2'-O-methyl-adenosine-3'-phosphate
  modified_base 11: mod_base = OTHER; note = 2'-O-methyl-uridine-3'-phosphate
  modified_base 12: mod_base = OTHER; note = 2'-O-methyl-uridine-3'-phosphate
  modified_base 13: mod_base = OTHER; note = 2'-O-methyl-cytidine-3'-phosphate
  modified_base 14: mod_base = OTHER; note = 2'-deoxy-2'-fluoro-uridine-3'-phosphate
  modified_base 15: mod_base = OTHER; note = 2'-O-methyl-guanosine-3'-phosphate
  modified_base 16: mod_base = OTHER; note = 2'-deoxy-2'-fluoro-adenosine-3'-phosphate
  modified_base 17: mod_base = OTHER; note = 2'-O-methyl-uridine-3'-phosphate
  modified_base 18: mod_base = OTHER; note = 2'-O-methyl-uridine-3'-phosphate
  modified_base 19: mod_base = OTHER; note = 2'-O-methyl-uridine-3'-phosphorothioate
  modified_base 20: mod_base = OTHER; note = 2'-O-methyl-uridine-3'-phosphorothioate
  modified_base 21: mod_base = OTHER; note = 2'-O-methyl-uridine-3'-phosphate
tatatagtgattctgattttt

SEQ ID NO: 2226 - RNA, 21 nt, synthetic construct
  source 1..21: mol_type = other RNA
  modified_base 1: mod_base = OTHER; note = 2'-O-methyl-uridine-3'-phosphorothioate
  modified_base 2: mod_base = OTHER; note = 2'-deoxy-2'-fluoro-cytidine-3'-phosphorothioate
  modified_base 3: mod_base = OTHER; note = 2'-O-methyl-uridine-3'-phosphate
  modified_base 4: mod_base = OTHER; note = 2'-O-methyl-guanosine-3'-phosphate
  modified_base 5: mod_base = OTHER; note = 2'-O-methyl-guanosine-3'-phosphate
  modified_base 6: mod_base = OTHER; note = 2'-deoxy-2'-fluoro-guanosine-3'-phosphate
  modified_base 7: mod_base = OTHER; note = 2'-O-methyl-guanosine-3'-phosphate
  modified_base 8: mod_base = OTHER; note = 2'-deoxy-2'-fluoro-adenosine-3'-phosphate
  modified_base 9: mod_base = OTHER; note = 2'-deoxy-2'-fluoro-guanosine-3'-phosphate
  modified_base 10: mod_base = OTHER; note = 2'-O-methyl-uridine-3'-phosphate
  modified_base 11: mod_base = OTHER; note = 2'-O-methyl-uridine-3'-phosphate
  modified_base 12: mod_base = OTHER; note = 2'-O-methyl-uridine-3'-phosphate
  modified_base 13: mod_base = OTHER; note = 2'-O-methyl-uridine-3'-phosphate
  modified_base 14: mod_base = OTHER; note = 2'-deoxy-2'-fluoro-cytidine-3'-phosphate
  modified_base 15: mod_base = OTHER; note = 2'-O-methyl-uridine-3'-phosphate
  modified_base 16: mod_base = OTHER; note = 2'-deoxy-2'-fluoro-guanosine-3'-phosphate
  modified_base 17: mod_base = OTHER; note = 2'-O-methyl-adenosine-3'-phosphate
  modified_base 18: mod_base = OTHER; note = 2'-O-methyl-cytidine-3'-phosphate
  modified_base 19: mod_base = OTHER; note = 2'-O-methyl-uridine-3'-phosphorothioate
  modified_base 20: mod_base = OTHER; note = 2'-O-methyl-uridine-3'-phosphorothioate
  modified_base 21: mod_base = OTHER; note = 2'-O-methyl-uridine-3'-phosphate
tctggggagttttctgacttt

SEQ ID NO: 2227 - RNA, 21 nt, synthetic construct
  source 1..21: mol_type = other RNA
  modified_base 1: mod_base = OTHER; note = 2'-O-methyl-uridine-3'-phosphorothioate
  modified_base 2: mod_base = OTHER; note = 2'-deoxy-2'-fluoro-guanosine-3'-phosphorothioate
  modified_base 3: mod_base = OTHER; note = 2'-O-methyl-cytidine-3'-phosphate
  modified_base 4: mod_base = OTHER; note = 2'-O-methyl-uridine-3'-phosphate
  modified_base 5: mod_base = OTHER; note = 2'-O-methyl-guanosine-3'-phosphate
  modified_base 6: mod_base = OTHER; note = 2'-deoxy-2'-fluoro-guanosine-3'-phosphate
  modified_base 7: mod_base = OTHER; note = 2'-O-methyl-guanosine-3'-phosphate
  modified_base 8: mod_base = OTHER; note = 2'-deoxy-2'-fluoro-guanosine-3'-phosphate
  modified_base 9: mod_base = OTHER; note = 2'-deoxy-2'-fluoro-adenosine-3'-phosphate
  modified_base 10: mod_base = OTHER; note = 2'-O-methyl-guanosine-3'-phosphate
  modified_base 11: mod_base = OTHER; note = 2'-O-methyl-uridine-3'-phosphate
  modified_base 12: mod_base = OTHER; note = 2'-O-methyl-uridine-3'-phosphate
  modified_base 13: mod_base = OTHER; note = 2'-O-methyl-uridine-3'-phosphate
  modified_base 14: mod_base = OTHER; note = 2'-deoxy-2'-fluoro-uridine-3'-phosphate
  modified_base 15: mod_base = OTHER; note = 2'-O-methyl-cytidine-3'-phosphate
  modified_base 16: mod_base = OTHER; note = 2'-deoxy-2'-fluoro-uridine-3'-phosphate
  modified_base 17: mod_base = OTHER; note = 2'-O-methyl-guanosine-3'-phosphate
  modified_base 18: mod_base = OTHER; note = 2'-O-methyl-adenosine-3'-phosphate
  modified_base 19: mod_base = OTHER; note = 2'-O-methyl-cytidine-3'-phosphorothioate
  modified_base 20: mod_base = OTHER; note = 2'-O-methyl-uridine-3'-phosphorothioate
  modified_base 21: mod_base = OTHER; note = 2'-O-methyl-uridine-3'-phosphate
tgctggggagttttctgactt

SEQ ID NO: 2228 - RNA, 21 nt, synthetic construct
  source 1..21: mol_type = other RNA
  modified_base 1: mod_base = OTHER; note = 2'-O-methyl-uridine-3'-phosphorothioate
  modified_base 2: mod_base = OTHER; note = 2'-deoxy-2'-fluoro-adenosine-3'-phosphorothioate
  modified_base 3: mod_base = OTHER; note = 2'-O-methyl-guanosine-3'-phosphate
  modified_base 4: mod_base = OTHER; note = 2'-O-methyl-cytidine-3'-phosphate
  modified_base 5: mod_base = OTHER; note = 2'-O-methyl-uridine-3'-phosphate
  modified_base 6: mod_base = OTHER; note = 2'-deoxy-2'-fluoro-guanosine-3'-phosphate
  modified_base 7: mod_base = OTHER; note = 2'-O-methyl-guanosine-3'-phosphate
  modified_base 8: mod_base = OTHER; note = 2'-deoxy-2'-fluoro-guanosine-3'-phosphate
  modified_base 9: mod_base = OTHER; note = 2'-deoxy-2'-fluoro-guanosine-3'-phosphate
  modified_base 10: mod_base = OTHER; note = 2'-O-methyl-adenosine-3'-phosphate
  modified_base 11: mod_base = OTHER; note = 2'-O-methyl-guanosine-3'-phosphate
  modified_base 12: mod_base = OTHER; note = 2'-O-methyl-uridine-3'-phosphate
  modified_base 13: mod_base = OTHER; note = 2'-O-methyl-uridine-3'-phosphate
  modified_base 14: mod_base = OTHER; note = 2'-deoxy-2'-fluoro-uridine-3'-phosphate
  modified_base 15: mod_base = OTHER; note = 2'-O-methyl-uridine-3'-phosphate
  modified_base 16: mod_base = OTHER; note = 2'-deoxy-2'-fluoro-cytidine-3'-phosphate
  modified_base 17: mod_base = OTHER; note = 2'-O-methyl-uridine-3'-phosphate
  modified_base 18: mod_base = OTHER; note = 2'-O-methyl-guanosine-3'-phosphate
  modified_base 19: mod_base = OTHER; note = 2'-O-methyl-adenosine-3'-phosphorothioate
  modified_base 20: mod_base = OTHER; note = 2'-O-methyl-uridine-3'-phosphorothioate
  modified_base 21: mod_base = OTHER; note = 2'-O-methyl-uridine-3'-phosphate
tagctggggagttttctgatt

SEQ ID NO: 2229 - RNA, 21 nt, synthetic construct
  source 1..21: mol_type = other RNA
  modified_base 1: mod_base = OTHER; note = 2'-O-methyl-uridine-3'-phosphorothioate
  modified_base 2: mod_base = OTHER; note = 2'-deoxy-2'-fluoro-uridine-3'-phosphorothioate
  modified_base 3: mod_base = OTHER; note = 2'-O-methyl-adenosine-3'-phosphate
  modified_base 4: mod_base = OTHER; note = 2'-O-methyl-guanosine-3'-phosphate
  modified_base 5: mod_base = OTHER; note = 2'-O-methyl-cytidine-3'-phosphate
  modified_base 6: mod_base = OTHER; note = 2'-deoxy-2'-fluoro-uridine-3'-phosphate
  modified_base 7: mod_base = OTHER; note = 2'-O-methyl-guanosine-3'-phosphate
  modified_base 8: mod_base = OTHER; note = 2'-deoxy-2'-fluoro-guanosine-3'-phosphate
  modified_base 9: mod_base = OTHER; note = 2'-deoxy-2'-fluoro-guanosine-3'-phosphate
  modified_base 10: mod_base = OTHER; note = 2'-O-methyl-guanosine-3'-phosphate
  modified_base 11: mod_base = OTHER; note = 2'-O-methyl-adenosine-3'-phosphate
  modified_base 12: mod_base = OTHER; note = 2'-O-methyl-guanosine-3'-phosphate
  modified_base 13: mod_base = OTHER; note = 2'-O-methyl-uridine-3'-phosphate
  modified_base 14: mod_base = OTHER; note = 2'-deoxy-2'-fluoro-uridine-3'-phosphate
  modified_base 15: mod_base = OTHER; note = 2'-O-methyl-uridine-3'-phosphate
  modified_base 16: mod_base = OTHER; note = 2'-deoxy-2'-fluoro-uridine-3'-phosphate
  modified_base 17: mod_base = OTHER; note = 2'-O-methyl-cytidine-3'-phosphate
  modified_base 18: mod_base = OTHER; note = 2'-O-methyl-uridine-3'-phosphate
  modified_base 19: mod_base = OTHER; note = 2'-O-methyl-guanosine-3'-phosphorothioate
  modified_base 20: mod_base = OTHER; note = 2'-O-methyl-uridine-3'-phosphorothioate
  modified_base 21: mod_base = OTHER; note = 2'-O-methyl-uridine-3'-phosphate
ttagctggggagttttctgtt

SEQ ID NO: 2230 - RNA, 21 nt, synthetic construct
  source 1..21: mol_type = other RNA
  modified_base 1: mod_base = OTHER; note = 2'-O-methyl-uridine-3'-phosphorothioate
  modified_base 2: mod_base = OTHER; note = 2'-deoxy-2'-fluoro-uridine-3'-phosphorothioate
  modified_base 3: mod_base = OTHER; note = 2'-O-methyl-uridine-3'-phosphate
  modified_base 4: mod_base = OTHER; note = 2'-O-methyl-adenosine-3'-phosphate
  modified_base 5: mod_base = OTHER; note = 2'-O-methyl-guanosine-3'-phosphate
  modified_base 6: mod_base = OTHER; note = 2'-deoxy-2'-fluoro-cytidine-3'-phosphate
  modified_base 7: mod_base = OTHER; note = 2'-O-methyl-uridine-3'-phosphate
  modified_base 8: mod_base = OTHER; note = 2'-deoxy-2'-fluoro-guanosine-3'-phosphate
  modified_base 9: mod_base = OTHER; note = 2'-deoxy-2'-fluoro-guanosine-3'-phosphate
  modified_base 10: mod_base = OTHER; note = 2'-O-methyl-guanosine-3'-phosphate
  modified_base 11: mod_base = OTHER; note = 2'-O-methyl-guanosine-3'-phosphate
  modified_base 12: mod_base = OTHER; note = 2'-O-methyl-adenosine-3'-phosphate
  modified_base 13: mod_base = OTHER; note = 2'-O-methyl-guanosine-3'-phosphate
  modified_base 14: mod_base = OTHER; note = 2'-deoxy-2'-fluoro-uridine-3'-phosphate
  modified_base 15: mod_base = OTHER; note = 2'-O-methyl-uridine-3'-phosphate
  modified_base 16: mod_base = OTHER; note = 2'-deoxy-2'-fluoro-uridine-3'-phosphate
  modified_base 17: mod_base = OTHER; note = 2'-O-methyl-uridine-3'-phosphate
  modified_base 18: mod_base = OTHER; note = 2'-O-methyl-cytidine-3'-phosphate
  modified_base 19: mod_base = OTHER; note = 2'-O-methyl-uridine-3'-phosphorothioate
  modified_base 20: mod_base = OTHER; note = 2'-O-methyl-uridine-3'-phosphorothioate
  modified_base 21: mod_base = OTHER; note = 2'-O-methyl-uridine-3'-phosphate
tttagctggggagttttcttt

SEQ ID NO: 2231 - RNA, 21 nt, synthetic construct
  source 1..21: mol_type = other RNA
  modified_base 1: mod_base = OTHER; note = 2'-O-methyl-uridine-3'-phosphorothioate
  modified_base 2: mod_base = OTHER; note = 2'-deoxy-2'-fluoro-uridine-3'-phosphorothioate
  modified_base 3: mod_base = OTHER; note = 2'-O-methyl-guanosine-3'-phosphate
  modified_base 4: mod_base = OTHER; note = 2'-O-methyl-uridine-3'-phosphate
  modified_base 5: mod_base = OTHER; note = 2'-O-methyl-uridine-3'-phosphate
  modified_base 6: mod_base = OTHER; note = 2'-deoxy-2'-fluoro-guanosine-3'-phosphate
  modified_base 7: mod_base = OTHER; note = 2'-O-methyl-uridine-3'-phosphate
  modified_base 8: mod_base = OTHER; note = 2'-deoxy-2'-fluoro-adenosine-3'-phosphate
  modified_base 9: mod_base = OTHER; note = 2'-deoxy-2'-fluoro-uridine-3'-phosphate
  modified_base 10: mod_base = OTHER; note = 2'-O-methyl-guanosine-3'-phosphate
  modified_base 11: mod_base = OTHER; note = 2'-O-methyl-adenosine-3'-phosphate
  modified_base 12: mod_base = OTHER; note = 2'-O-methyl-adenosine-3'-phosphate
  modified_base 13: mod_base = OTHER; note = 2'-O-methyl-guanosine-3'-phosphate
  modified_base 14: mod_base = OTHER; note = 2'-deoxy-2'-fluoro-uridine-3'-phosphate
  modified_base 15: mod_base = OTHER; note = 2'-O-methyl-cytidine-3'-phosphate
  modified_base 16: mod_base = OTHER; note = 2'-deoxy-2'-fluoro-uridine-3'-phosphate
  modified_base 17: mod_base = OTHER; note = 2'-O-methyl-uridine-3'-phosphate
  modified_base 18: mod_base = OTHER; note = 2'-O-methyl-adenosine-3'-phosphate
  modified_base 19: mod_base = OTHER; note = 2'-O-methyl-cytidine-3'-phosphorothioate
  modified_base 20: mod_base = OTHER; note = 2'-O-methyl-uridine-3'-phosphorothioate
  modified_base 21: mod_base = OTHER; note = 2'-O-methyl-uridine-3'-phosphate
ttgttgtatgaagtcttactt

SEQ ID NO: 2232 - RNA, 21 nt, synthetic construct
  source 1..21: mol_type = other RNA
  modified_base 1: mod_base = OTHER; note = 2'-O-methyl-uridine-3'-phosphorothioate
  modified_base 2: mod_base = OTHER; note = 2'-deoxy-2'-fluoro-uridine-3'-phosphorothioate
  modified_base 3: mod_base = OTHER; note = 2'-O-methyl-guanosine-3'-phosphate
  modified_base 4: mod_base = OTHER; note = 2'-O-methyl-uridine-3'-phosphate
  modified_base 5: mod_base = OTHER; note = 2'-O-methyl-guanosine-3'-phosphate
  modified_base 6: mod_base = OTHER; note = 2'-deoxy-2'-fluoro-uridine-3'-phosphate
  modified_base 7: mod_base = OTHER; note = 2'-O-methyl-uridine-3'-phosphate
  modified_base 8: mod_base = OTHER; note = 2'-deoxy-2'-fluoro-guanosine-3'-phosphate
  modified_base 9: mod_base = OTHER; note = 2'-deoxy-2'-fluoro-uridine-3'-phosphate
  modified_base 10: mod_base = OTHER; note = 2'-O-methyl-adenosine-3'-phosphate
  modified_base 11: mod_base = OTHER; note = 2'-O-methyl-uridine-3'-phosphate
  modified_base 12: mod_base = OTHER; note = 2'-O-methyl-guanosine-3'-phosphate
  modified_base 13: mod_base = OTHER; note = 2'-O-methyl-adenosine-3'-phosphate
  modified_base 14: mod_base = OTHER; note = 2'-deoxy-2'-fluoro-adenosine-3'-phosphate
  modified_base 15: mod_base = OTHER; note = 2'-O-methyl-guanosine-3'-phosphate
  modified_base 16: mod_base = OTHER; note = 2'-deoxy-2'-fluoro-uridine-3'-phosphate
  modified_base 17: mod_base = OTHER; note = 2'-O-methyl-cytidine-3'-phosphate
  modified_base 18: mod_base = OTHER; note = 2'-O-methyl-uridine-3'-phosphate
  modified_base 19: mod_base = OTHER; note = 2'-O-methyl-uridine-3'-phosphorothioate
  modified_base 20: mod_base = OTHER; note = 2'-O-methyl-uridine-3'-phosphorothioate
  modified_base 21: mod_base = OTHER; note = 2'-O-methyl-uridine-3'-phosphate
ttgtgttgtatgaagtctttt

SEQ ID NO: 2233 - RNA, 21 nt, synthetic construct
  source 1..21: mol_type = other RNA
  modified_base 1: mod_base = OTHER; note = 2'-O-methyl-uridine-3'-phosphorothioate
  modified_base 2: mod_base = OTHER; note = 2'-deoxy-2'-fluoro-uridine-3'-phosphorothioate
  modified_base 3: mod_base = OTHER; note = 2'-O-methyl-uridine-3'-phosphate
  modified_base 4: mod_base = OTHER; note = 2'-O-methyl-guanosine-3'-phosphate
  modified_base 5: mod_base = OTHER; note = 2'-O-methyl-uridine-3'-phosphate
  modified_base 6: mod_base = OTHER; note = 2'-deoxy-2'-fluoro-guanosine-3'-phosphate
  modified_base 7: mod_base = OTHER; note = 2'-O-methyl-uridine-3'-phosphate
  modified_base 8: mod_base = OTHER; note = 2'-deoxy-2'-fluoro-uridine-3'-phosphate
  modified_base 9: mod_base = OTHER; note = 2'-deoxy-2'-fluoro-guanosine-3'-phosphate
  modified_base 10: mod_base = OTHER; note = 2'-O-methyl-uridine-3'-phosphate
  modified_base 11: mod_base = OTHER; note = 2'-O-methyl-adenosine-3'-phosphate
  modified_base 12: mod_base = OTHER; note = 2'-O-methyl-uridine-3'-phosphate
  modified_base 13: mod_base = OTHER; note = 2'-O-methyl-guanosine-3'-phosphate
  modified_base 14: mod_base = OTHER; note = 2'-deoxy-2'-fluoro-adenosine-3'-phosphate
  modified_base 15: mod_base = OTHER; note = 2'-O-methyl-adenosine-3'-phosphate
  modified_base 16: mod_base = OTHER; note = 2'-deoxy-2'-fluoro-guanosine-3'-phosphate
  modified_base 17: mod_base = OTHER; note = 2'-O-methyl-uridine-3'-phosphate
  modified_base 18: mod_base = OTHER; note = 2'-O-methyl-cytidine-3'-phosphate
  modified_base 19: mod_base = OTHER; note = 2'-O-methyl-uridine-3'-phosphorothioate
  modified_base 20: mod_base = OTHER; note = 2'-O-methyl-uridine-3'-phosphorothioate
  modified_base 21: mod_base = OTHER; note = 2'-O-methyl-uridine-3'-phosphate
tttgtgttgtatgaagtcttt

SEQ ID NO: 2234 - RNA, 21 nt, synthetic construct
  source 1..21: mol_type = other RNA
  modified_base 1: mod_base = OTHER; note = 2'-O-methyl-uridine-3'-phosphorothioate
  modified_base 2: mod_base = OTHER; note = 2'-deoxy-2'-fluoro-uridine-3'-phosphorothioate
  modified_base 3: mod_base = OTHER; note = 2'-O-methyl-uridine-3'-phosphate
  modified_base 4: mod_base = OTHER; note = 2'-O-methyl-uridine-3'-phosphate
  modified_base 5: mod_base = OTHER; note = 2'-O-methyl-uridine-3'-phosphate
  modified_base 6: mod_base = OTHER; note = 2'-deoxy-2'-fluoro-adenosine-3'-phosphate
  modified_base 7: mod_base = OTHER; note = 2'-O-methyl-guanosine-3'-phosphate
  modified_base 8: mod_base = OTHER; note = 2'-deoxy-2'-fluoro-guanosine-3'-phosphate
  modified_base 9: mod_base = OTHER; note = 2'-deoxy-2'-fluoro-uridine-3'-phosphate
  modified_base 10: mod_base = OTHER; note = 2'-O-methyl-adenosine-3'-phosphate
  modified_base 11: mod_base = OTHER; note = 2'-O-methyl-guanosine-3'-phosphate
  modified_base 12: mod_base = OTHER; note = 2'-O-methyl-cytidine-3'-phosphate
  modified_base 13: mod_base = OTHER; note = 2'-O-methyl-cytidine-3'-phosphate
  modified_base 14: mod_base = OTHER; note = 2'-deoxy-2'-fluoro-uridine-3'-phosphate
  modified_base 15: mod_base = OTHER; note = 2'-O-methyl-uridine-3'-phosphate
  modified_base 16: mod_base = OTHER; note = 2'-deoxy-2'-fluoro-guanosine-3'-phosphate
  modified_base 17: mod_base = OTHER; note = 2'-O-methyl-guanosine-3'-phosphate
  modified_base 18: mod_base = OTHER; note = 2'-O-methyl-cytidine-3'-phosphate
  modified_base 19: mod_base = OTHER; note = 2'-O-methyl-adenosine-3'-phosphorothioate
  modified_base 20: mod_base = OTHER; note = 2'-O-methyl-uridine-3'-phosphorothioate
  modified_base 21: mod_base = OTHER; note = 2'-O-methyl-uridine-3'-phosphate
tttttaggtagccttggcatt

SEQ ID NO: 2235 - RNA, 21 nt, synthetic construct
  source 1..21: mol_type = other RNA
  modified_base 1: mod_base = OTHER; note = 2'-O-methyl-uridine-3'-phosphorothioate
  modified_base 2: mod_base = OTHER; note = 2'-deoxy-2'-fluoro-uridine-3'-phosphorothioate
  modified_base 3: mod_base = OTHER; note = 2'-O-methyl-uridine-3'-phosphate
  modified_base 4: mod_base = OTHER; note = 2'-O-methyl-cytidine-3'-phosphate
  modified_base 5: mod_base = OTHER; note = 2'-O-methyl-uridine-3'-phosphate
  modified_base 6: mod_base = OTHER; note = 2'-deoxy-2'-fluoro-uridine-3'-phosphate
  modified_base 7: mod_base = OTHER; note = 2'-O-methyl-uridine-3'-phosphate
  modified_base 8: mod_base = OTHER; note = 2'-deoxy-2'-fluoro-uridine-3'-phosphate
  modified_base 9: mod_base = OTHER; note = 2'-deoxy-2'-fluoro-adenosine-3'-phosphate
  modified_base 10: mod_base = OTHER; note = 2'-O-methyl-guanosine-3'-phosphate
  modified_base 11: mod_base = OTHER; note = 2'-O-methyl-guanosine-3'-phosphate
  modified_base 12: mod_base = OTHER; note = 2'-O-methyl-uridine-3'-phosphate
  modified_base 13: mod_base = OTHER; note = 2'-O-methyl-adenosine-3'-phosphate
  modified_base 14: mod_base = OTHER; note = 2'-deoxy-2'-fluoro-guanosine-3'-phosphate
  modified_base 15: mod_base = OTHER; note = 2'-O-methyl-cytidine-3'-phosphate
  modified_base 16: mod_base = OTHER; note = 2'-deoxy-2'-fluoro-cytidine-3'-phosphate
  modified_base 17: mod_base = OTHER; note = 2'-O-methyl-uridine-3'-phosphate
  modified_base 18: mod_base = OTHER; note = 2'-O-methyl-uridine-3'-phosphate
  modified_base 19: mod_base = OTHER; note = 2'-O-methyl-guanosine-3'-phosphorothioate
  modified_base 20: mod_base = OTHER; note = 2'-O-methyl-uridine-3'-phosphorothioate
  modified_base 21: mod_base = OTHER; note = 2'-O-methyl-uridine-3'-phosphate
tttcttttaggtagccttgtt

SEQ ID NO: 2236 - RNA, 21 nt, synthetic construct
  source 1..21: mol_type = other RNA
  modified_base 1: mod_base = OTHER; note = 2'-O-methyl-uridine-3'-phosphorothioate
  modified_base 2: mod_base = OTHER; note = 2'-deoxy-2'-fluoro-cytidine-3'-phosphorothioate
  modified_base 3: mod_base = OTHER; note = 2'-O-methyl-uridine-3'-phosphate
  modified_base 4: mod_base = OTHER; note = 2'-O-methyl-uridine-3'-phosphate
  modified_base 5: mod_base = OTHER; note = 2'-O-methyl-cytidine-3'-phosphate
  modified_base 6: mod_base = OTHER; note = 2'-deoxy-2'-fluoro-uridine-3'-phosphate
  modified_base 7: mod_base = OTHER; note = 2'-O-methyl-uridine-3'-phosphate
  modified_base 8: mod_base = OTHER; note = 2'-deoxy-2'-fluoro-uridine-3'-phosphate
  modified_base 9: mod_base = OTHER; note = 2'-deoxy-2'-fluoro-uridine-3'-phosphate
  modified_base 10: mod_base = OTHER; note = 2'-O-methyl-adenosine-3'-phosphate
  modified_base 11: mod_base = OTHER; note = 2'-O-methyl-guanosine-3'-phosphate
  modified_base 12: mod_base = OTHER; note = 2'-O-methyl-guanosine-3'-phosphate
  modified_base 13: mod_base = OTHER; note = 2'-O-methyl-uridine-3'-phosphate
  modified_base 14: mod_base = OTHER; note = 2'-deoxy-2'-fluoro-adenosine-3'-phosphate
  modified_base 15: mod_base = OTHER; note = 2'-O-methyl-guanosine-3'-phosphate
  modified_base 16: mod_base = OTHER; note = 2'-deoxy-2'-fluoro-cytidine-3'-phosphate
  modified_base 17: mod_base = OTHER; note = 2'-O-methyl-cytidine-3'-phosphate
  modified_base 18: mod_base = OTHER; note = 2'-O-methyl-uridine-3'-phosphate
  modified_base 19: mod_base = OTHER; note = 2'-O-methyl-uridine-3'-phosphorothioate
  modified_base 20: mod_base = OTHER; note = 2'-O-methyl-uridine-3'-phosphorothioate
  modified_base 21: mod_base = OTHER; note = 2'-O-methyl-uridine-3'-phosphate
tcttcttttaggtagcctttt

SEQ ID NO: 2237 - RNA, 21 nt, synthetic construct
  source 1..21: mol_type = other RNA
  modified_base 1: mod_base = OTHER; note = 2'-O-methyl-uridine-3'-phosphorothioate
  modified_base 2: mod_base = OTHER; note = 2'-deoxy-2'-fluoro-uridine-3'-phosphorothioate
  modified_base 3: mod_base = OTHER; note = 2'-O-methyl-cytidine-3'-phosphate
  modified_base 4: mod_base = OTHER; note = 2'-O-methyl-uridine-3'-phosphate
  modified_base 5: mod_base = OTHER; note = 2'-O-methyl-uridine-3'-phosphate
  modified_base 6: mod_base = OTHER; note = 2'-deoxy-2'-fluoro-cytidine-3'-phosphate
  modified_base 7: mod_base = OTHER; note = 2'-O-methyl-uridine-3'-phosphate
  modified_base 8: mod_base = OTHER; note = 2'-deoxy-2'-fluoro-uridine-3'-phosphate
  modified_base 9: mod_base = OTHER; note = 2'-deoxy-2'-fluoro-uridine-3'-phosphate
  modified_base 10: mod_base = OTHER; note = 2'-O-methyl-uridine-3'-phosphate
  modified_base 11: mod_base = OTHER; note = 2'-O-methyl-adenosine-3'-phosphate
  modified_base 12: mod_base = OTHER; note = 2'-O-methyl-guanosine-3'-phosphate
  modified_base 13: mod_base = OTHER; note = 2'-O-methyl-guanosine-3'-phosphate
  modified_base 14: mod_base = OTHER; note = 2'-deoxy-2'-fluoro-uridine-3'-phosphate
  modified_base 15: mod_base = OTHER; note = 2'-O-methyl-adenosine-3'-phosphate
  modified_base 16: mod_base = OTHER; note = 2'-deoxy-2'-fluoro-guanosine-3'-phosphate
  modified_base 17: mod_base = OTHER; note = 2'-O-methyl-cytidine-3'-phosphate
  modified_base 18: mod_base = OTHER; note = 2'-O-methyl-cytidine-3'-phosphate
  modified_base 19: mod_base = OTHER; note = 2'-O-methyl-uridine-3'-phosphorothioate
  modified_base 20: mod_base = OTHER; note = 2'-O-methyl-uridine-3'-phosphorothioate
  modified_base 21: mod_base = OTHER; note = 2'-O-methyl-uridine-3'-phosphate
ttcttcttttaggtagccttt

SEQ ID NO: 2238 - RNA, 21 nt, synthetic construct
  source 1..21: mol_type = other RNA
  modified_base 1: mod_base = OTHER; note = 2'-O-methyl-uridine-3'-phosphorothioate
  modified_base 2: mod_base = OTHER; note = 2'-deoxy-2'-fluoro-guanosine-3'-phosphorothioate
  modified_base 3: mod_base = OTHER; note = 2'-O-methyl-uridine-3'-phosphate
  modified_base 4: mod_base = OTHER; note = 2'-O-methyl-cytidine-3'-phosphate
  modified_base 5: mod_base = OTHER; note = 2'-O-methyl-uridine-3'-phosphate
  modified_base 6: mod_base = OTHER; note = 2'-deoxy-2'-fluoro-uridine-3'-phosphate
  modified_base 7: mod_base = OTHER; note = 2'-O-methyl-cytidine-3'-phosphate
  modified_base 8: mod_base = OTHER; note = 2'-deoxy-2'-fluoro-uridine-3'-phosphate
  modified_base 9: mod_base = OTHER; note = 2'-deoxy-2'-fluoro-uridine-3'-phosphate
  modified_base 10: mod_base = OTHER; note = 2'-O-methyl-uridine-3'-phosphate
  modified_base 11: mod_base = OTHER; note = 2'-O-methyl-uridine-3'-phosphate
  modified_base 12: mod_base = OTHER; note = 2'-O-methyl-adenosine-3'-phosphate
  modified_base 13: mod_base = OTHER; note = 2'-O-methyl-guanosine-3'-phosphate
  modified_base 14: mod_base = OTHER; note = 2'-deoxy-2'-fluoro-guanosine-3'-phosphate
  modified_base 15: mod_base = OTHER; note = 2'-O-methyl-uridine-3'-phosphate
  modified_base 16: mod_base = OTHER; note = 2'-deoxy-2'-fluoro-adenosine-3'-phosphate
  modified_base 17: mod_base = OTHER; note = 2'-O-methyl-guanosine-3'-phosphate
  modified_base 18: mod_base = OTHER; note = 2'-O-methyl-cytidine-3'-phosphate
  modified_base 19: mod_base = OTHER; note = 2'-O-methyl-cytidine-3'-phosphorothioate
  modified_base 20: mod_base = OTHER; note = 2'-O-methyl-uridine-3'-phosphorothioate
  modified_base 21: mod_base = OTHER; note = 2'-O-methyl-uridine-3'-phosphate
tgtcttcttttaggtagcctt

SEQ ID NO: 2239 - RNA, 21 nt, synthetic construct
  source 1..21: mol_type = other RNA
  modified_base 1: mod_base = OTHER; note = 2'-O-methyl-uridine-3'-phosphorothioate
  modified_base 2: mod_base = OTHER; note = 2'-deoxy-2'-fluoro-uridine-3'-phosphorothioate
  modified_base 3: mod_base = OTHER; note = 2'-O-methyl-guanosine-3'-phosphate
  modified_base 4: mod_base = OTHER; note = 2'-O-methyl-uridine-3'-phosphate
  modified_base 5: mod_base = OTHER; note = 2'-O-methyl-cytidine-3'-phosphate
  modified_base 6: mod_base = OTHER; note = 2'-deoxy-2'-fluoro-uridine-3'-phosphate
  modified_base 7: mod_base = OTHER; note = 2'-O-methyl-uridine-3'-phosphate
  modified_base 8: mod_base = OTHER; note = 2'-deoxy-2'-fluoro-cytidine-3'-phosphate
  modified_base 9: mod_base = OTHER; note = 2'-deoxy-2'-fluoro-uridine-3'-phosphate
  modified_base 10: mod_base = OTHER; note = 2'-O-methyl-uridine-3'-phosphate
  modified_base 11: mod_base = OTHER; note = 2'-O-methyl-uridine-3'-phosphate
  modified_base 12: mod_base = OTHER; note = 2'-O-methyl-uridine-3'-phosphate
  modified_base 13: mod_base = OTHER; note = 2'-O-methyl-adenosine-3'-phosphate
  modified_base 14: mod_base = OTHER; note = 2'-deoxy-2'-fluoro-guanosine-3'-phosphate
  modified_base 15: mod_base = OTHER; note = 2'-O-methyl-guanosine-3'-phosphate
  modified_base 16: mod_base = OTHER; note = 2'-deoxy-2'-fluoro-uridine-3'-phosphate
  modified_base 17: mod_base = OTHER; note = 2'-O-methyl-adenosine-3'-phosphate
  modified_base 18: mod_base = OTHER; note = 2'-O-methyl-guanosine-3'-phosphate
  modified_base 19: mod_base = OTHER; note = 2'-O-methyl-cytidine-3'-phosphorothioate
  modified_base 20: mod_base = OTHER; note = 2'-O-methyl-uridine-3'-phosphorothioate
  modified_base 21: mod_base = OTHER; note = 2'-O-methyl-uridine-3'-phosphate
ttgtcttcttttaggtagctt

SEQ ID NO: 2240 - RNA, 21 nt, synthetic construct
  source 1..21: mol_type = other RNA
  modified_base 1: mod_base = OTHER; note = 2'-O-methyl-uridine-3'-phosphorothioate
  modified_base 2: mod_base = OTHER; note = 2'-deoxy-2'-fluoro-cytidine-3'-phosphorothioate
  modified_base 3: mod_base = OTHER; note = 2'-O-methyl-uridine-3'-phosphate
  modified_base 4: mod_base = OTHER; note = 2'-O-methyl-guanosine-3'-phosphate
  modified_base 5: mod_base = OTHER; note = 2'-O-methyl-uridine-3'-phosphate
  modified_base 6: mod_base = OTHER; note = 2'-deoxy-2'-fluoro-cytidine-3'-phosphate
  modified_base 7: mod_base = OTHER; note = 2'-O-methyl-uridine-3'-phosphate
  modified_base 8: mod_base = OTHER; note = 2'-deoxy-2'-fluoro-uridine-3'-phosphate
  modified_base 9: mod_base = OTHER; note = 2'-deoxy-2'-fluoro-cytidine-3'-phosphate
  modified_base 10: mod_base = OTHER; note = 2'-O-methyl-uridine-3'-phosphate
  modified_base 11: mod_base = OTHER; note = 2'-O-methyl-uridine-3'-phosphate
  modified_base 12: mod_base = OTHER; note = 2'-O-methyl-uridine-3'-phosphate
  modified_base 13: mod_base = OTHER; note = 2'-O-methyl-uridine-3'-phosphate
  modified_base 14: mod_base = OTHER; note = 2'-deoxy-2'-fluoro-adenosine-3'-phosphate
  modified_base 15: mod_base = OTHER; note = 2'-O-methyl-guanosine-3'-phosphate
  modified_base 16: mod_base = OTHER; note = 2'-deoxy-2'-fluoro-guanosine-3'-phosphate
  modified_base 17: mod_base = OTHER; note = 2'-O-methyl-uridine-3'-phosphate
  modified_base 18: mod_base = OTHER; note = 2'-O-methyl-adenosine-3'-phosphate
  modified_base 19: mod_base = OTHER; note = 2'-O-methyl-guanosine-3'-phosphorothioate
  modified_base 20: mod_base = OTHER; note = 2'-O-methyl-uridine-3'-phosphorothioate
  modified_base 21: mod_base = OTHER; note = 2'-O-methyl-uridine-3'-phosphate
tctgtcttcttttaggtagtt

SEQ ID NO: 2241 - RNA, 21 nt, synthetic construct
  source 1..21: mol_type = other RNA
  modified_base 1: mod_base = OTHER; note = 2'-O-methyl-uridine-3'-phosphorothioate
  modified_base 2: mod_base = OTHER; note = 2'-deoxy-2'-fluoro-adenosine-3'-phosphorothioate
  modified_base 3: mod_base = OTHER; note = 2'-O-methyl-cytidine-3'-phosphate
  modified_base 4: mod_base = OTHER; note = 2'-O-methyl-uridine-3'-phosphate
  modified_base 5: mod_base = OTHER; note = 2'-O-methyl-guanosine-3'-phosphate
  modified_base 6: mod_base = OTHER; note = 2'-deoxy-2'-fluoro-uridine-3'-phosphate
  modified_base 7: mod_base = OTHER; note = 2'-O-methyl-cytidine-3'-phosphate
  modified_base 8: mod_base = OTHER; note = 2'-deoxy-2'-fluoro-uridine-3'-phosphate
  modified_base 9: mod_base = OTHER; note = 2'-deoxy-2'-fluoro-uridine-3'-phosphate
  modified_base 10: mod_base = OTHER; note = 2'-O-methyl-cytidine-3'-phosphate
  modified_base 11: mod_base = OTHER; note = 2'-O-methyl-uridine-3'-phosphate
  modified_base 12: mod_base = OTHER; note = 2'-O-methyl-uridine-3'-phosphate
  modified_base 13: mod_base = OTHER; note = 2'-O-methyl-uridine-3'-phosphate
  modified_base 14: mod_base = OTHER; note = 2'-deoxy-2'-fluoro-uridine-3'-phosphate
  modified_base 15: mod_base = OTHER; note = 2'-O-methyl-adenosine-3'-phosphate
  modified_base 16: mod_base = OTHER; note = 2'-deoxy-2'-fluoro-guanosine-3'-phosphate
  modified_base 17: mod_base = OTHER; note = 2'-O-methyl-guanosine-3'-phosphate
  modified_base 18: mod_base = OTHER; note = 2'-O-methyl-uridine-3'-phosphate
  modified_base 19: mod_base = OTHER; note = 2'-O-methyl-adenosine-3'-phosphorothioate
  modified_base 20: mod_base = OTHER; note = 2'-O-methyl-uridine-3'-phosphorothioate
  modified_base 21: mod_base = OTHER; note = 2'-O-methyl-uridine-3'-phosphate
tactgtcttcttttaggtatt

SEQ ID NO: 2242 - RNA, 21 nt, synthetic construct
  source 1..21: mol_type = other RNA
  modified_base 1: mod_base = OTHER; note = 2'-O-methyl-uridine-3'-phosphorothioate
  modified_base 2: mod_base = OTHER; note = 2'-deoxy-2'-fluoro-adenosine-3'-phosphorothioate
  modified_base 3: mod_base = OTHER; note = 2'-O-methyl-adenosine-3'-phosphate
  modified_base 4: mod_base = OTHER; note = 2'-O-methyl-cytidine-3'-phosphate
  modified_base 5: mod_base = OTHER; note = 2'-O-methyl-uridine-3'-phosphate
  modified_base 6: mod_base = OTHER; note = 2'-deoxy-2'-fluoro-guanosine-3'-phosphate
  modified_base 7: mod_base = OTHER; note = 2'-O-methyl-uridine-3'-phosphate
  modified_base 8: mod_base = OTHER; note = 2'-deoxy-2'-fluoro-cytidine-3'-phosphate
  modified_base 9: mod_base = OTHER; note = 2'-deoxy-2'-fluoro-uridine-3'-phosphate
  modified_base 10: mod_base = OTHER; note = 2'-O-methyl-uridine-3'-phosphate
  modified_base 11: mod_base = OTHER; note = 2'-O-methyl-cytidine-3'-phosphate
  modified_base 12: mod_base = OTHER; note = 2'-O-methyl-uridine-3'-phosphate
  modified_base 13: mod_base = OTHER; note = 2'-O-methyl-uridine-3'-phosphate
  modified_base 14: mod_base = OTHER; note = 2'-deoxy-2'-fluoro-uridine-3'-phosphate
  modified_base 15: mod_base = OTHER; note = 2'-O-methyl-uridine-3'-phosphate
  modified_base 16: mod_base = OTHER; note = 2'-deoxy-2'-fluoro-adenosine-3'-phosphate
  modified_base 17: mod_base = OTHER; note = 2'-O-methyl-guanosine-3'-phosphate
  modified_base 18: mod_base = OTHER; note = 2'-O-methyl-guanosine-3'-phosphate
  modified_base 19: mod_base = OTHER; note = 2'-O-methyl-uridine-3'-phosphorothioate
  modified_base 20: mod_base = OTHER; note = 2'-O-methyl-uridine-3'-phosphorothioate
  modified_base 21: mod_base = OTHER; note = 2'-O-methyl-uridine-3'-phosphate
taactgtcttcttttaggttt

SEQ ID NO: 2243 - RNA, 21 nt, synthetic construct
  source 1..21: mol_type = other RNA
  modified_base 1: mod_base = OTHER; note = 2'-O-methyl-uridine-3'-phosphorothioate
  modified_base 2: mod_base = OTHER; note = 2'-deoxy-2'-fluoro-uridine-3'-phosphorothioate
  modified_base 3: mod_base = OTHER; note = 2'-O-methyl-adenosine-3'-phosphate
  modified_base 4: mod_base = OTHER; note = 2'-O-methyl-adenosine-3'-phosphate
  modified_base 5: mod_base = OTHER; note = 2'-O-methyl-cytidine-3'-phosphate
  modified_base 6: mod_base = OTHER; note = 2'-deoxy-2'-fluoro-uridine-3'-phosphate
  modified_base 7: mod_base = OTHER; note = 2'-O-methyl-guanosine-3'-phosphate
  modified_base 8: mod_base = OTHER; note = 2'-deoxy-2'-fluoro-uridine-3'-phosphate
  modified_base 9: mod_base = OTHER; note = 2'-deoxy-2'-fluoro-cytidine-3'-phosphate
  modified_base 10: mod_base = OTHER; note = 2'-O-methyl-uridine-3'-phosphate
  modified_base 11: mod_base = OTHER; note = 2'-O-methyl-uridine-3'-phosphate
  modified_base 12: mod_base = OTHER; note = 2'-O-methyl-cytidine-3'-phosphate
  modified_base 13: mod_base = OTHER; note = 2'-O-methyl-uridine-3'-phosphate
  modified_base 14: mod_base = OTHER; note = 2'-deoxy-2'-fluoro-uridine-3'-phosphate
  modified_base 15: mod_base = OTHER; note = 2'-O-methyl-uridine-3'-phosphate
  modified_base 16: mod_base = OTHER; note = 2'-deoxy-2'-fluoro-uridine-3'-phosphate
  modified_base 17: mod_base = OTHER; note = 2'-O-methyl-adenosine-3'-phosphate
  modified_base 18: mod_base = OTHER; note = 2'-O-methyl-guanosine-3'-phosphate
  modified_base 19: mod_base = OTHER; note = 2'-O-methyl-guanosine-3'-phosphorothioate
  modified_base 20: mod_base = OTHER; note = 2'-O-methyl-uridine-3'-phosphorothioate
  modified_base 21: mod_base = OTHER; note = 2'-O-methyl-uridine-3'-phosphate
ttaactgtcttcttttaggtt

SEQ ID NO: 2244 - RNA, 21 nt, synthetic construct
  source 1..21: mol_type = other RNA
  modified_base 1: mod_base = OTHER; note = 2'-O-methyl-uridine-3'-phosphorothioate
  modified_base 2: mod_base = OTHER; note = 2'-deoxy-2'-fluoro-adenosine-3'-phosphorothioate
  modified_base 3: mod_base = OTHER; note = 2'-O-methyl-uridine-3'-phosphate
  modified_base 4: mod_base = OTHER; note = 2'-O-methyl-adenosine-3'-phosphate
  modified_base 5: mod_base = OTHER; note = 2'-O-methyl-adenosine-3'-phosphate
  modified_base 6: mod_base = OTHER; note = 2'-deoxy-2'-fluoro-cytidine-3'-phosphate
  modified_base 7: mod_base = OTHER; note = 2'-O-methyl-uridine-3'-phosphate
  modified_base 8: mod_base = OTHER; note = 2'-deoxy-2'-fluoro-guanosine-3'-phosphate
  modified_base 9: mod_base = OTHER; note = 2'-deoxy-2'-fluoro-uridine-3'-phosphate
  modified_base 10: mod_base = OTHER; note = 2'-O-methyl-cytidine-3'-phosphate
  modified_base 11: mod_base = OTHER; note = 2'-O-methyl-uridine-3'-phosphate
  modified_base 12: mod_base = OTHER; note = 2'-O-methyl-uridine-3'-phosphate
  modified_base 13: mod_base = OTHER; note = 2'-O-methyl-cytidine-3'-phosphate
  modified_base 14: mod_base = OTHER; note = 2'-deoxy-2'-fluoro-uridine-3'-phosphate
  modified_base 15: mod_base = OTHER; note = 2'-O-methyl-uridine-3'-phosphate
  modified_base 16: mod_base = OTHER; note = 2'-deoxy-2'-fluoro-uridine-3'-phosphate
  modified_base 17: mod_base = OTHER; note = 2'-O-methyl-uridine-3'-phosphate
  modified_base 18: mod_base = OTHER; note = 2'-O-methyl-adenosine-3'-phosphate
  modified_base 19: mod_base = OTHER; note = 2'-O-methyl-guanosine-3'-phosphorothioate
  modified_base 20: mod_base = OTHER; note = 2'-O-methyl-uridine-3'-phosphorothioate
  modified_base 21: mod_base = OTHER; note = 2'-O-methyl-uridine-3'-phosphate
tataactgtcttcttttagtt

SEQ ID NO: 2245 - RNA, 21 nt, synthetic construct
  source 1..21: mol_type = other RNA
  modified_base 1: mod_base = OTHER; note = 2'-O-methyl-uridine-3'-phosphorothioate
  modified_base 2: mod_base = OTHER; note = 2'-deoxy-2'-fluoro-guanosine-3'-phosphorothioate
  modified_base 3: mod_base = OTHER; note = 2'-O-methyl-adenosine-3'-phosphate
  modified_base 4: mod_base = OTHER; note = 2'-O-methyl-uridine-3'-phosphate
  modified_base 5: mod_base = OTHER; note = 2'-O-methyl-adenosine-3'-phosphate
  modified_base 6: mod_base = OTHER; note = 2'-deoxy-2'-fluoro-adenosine-3'-phosphate
  modified_base 7: mod_base = OTHER; note = 2'-O-methyl-cytidine-3'-phosphate
  modified_base 8: mod_base = OTHER; note = 2'-deoxy-2'-fluoro-uridine-3'-phosphate
  modified_base 9: mod_base = OTHER; note = 2'-deoxy-2'-fluoro-guanosine-3'-phosphate
  modified_base 10: mod_base = OTHER; note = 2'-O-methyl-uridine-3'-phosphate
  modified_base 11: mod_base = OTHER; note = 2'-O-methyl-cytidine-3'-phosphate
  modified_base 12: mod_base = OTHER; note = 2'-O-methyl-uridine-3'-phosphate
  modified_base 13: mod_base = OTHER; note = 2'-O-methyl-uridine-3'-phosphate
  modified_base 14: mod_base = OTHER; note = 2'-deoxy-2'-fluoro-cytidine-3'-phosphate
  modified_base 15: mod_base = OTHER; note = 2'-O-methyl-uridine-3'-phosphate
  modified_base 16: mod_base = OTHER; note = 2'-deoxy-2'-fluoro-uridine-3'-phosphate
  modified_base 17: mod_base = OTHER; note = 2'-O-methyl-uridine-3'-phosphate
  modified_base 18: mod_base = OTHER; note = 2'-O-methyl-uridine-3'-phosphate
  modified_base 19: mod_base = OTHER; note = 2'-O-methyl-adenosine-3'-phosphorothioate
  modified_base 20: mod_base = OTHER; note = 2'-O-methyl-uridine-3'-phosphorothioate
  modified_base 21: mod_base = OTHER; note = 2'-O-methyl-uridine-3'-phosphate
tgataactgtcttcttttatt

SEQ ID NO: 2246 - RNA, 21 nt, synthetic construct
  source 1..21: mol_type = other RNA
  modified_base 1: mod_base = OTHER; note = 2'-O-methyl-uridine-3'-phosphorothioate
  modified_base 2: mod_base = OTHER; note = 2'-deoxy-2'-fluoro-adenosine-3'-phosphorothioate
  modified_base 3: mod_base = OTHER; note = 2'-O-methyl-guanosine-3'-phosphate
  modified_base 4: mod_base = OTHER; note = 2'-O-methyl-adenosine-3'-phosphate
  modified_base 5: mod_base = OTHER; note = 2'-O-methyl-uridine-3'-phosphate
  modified_base 6: mod_base = OTHER; note = 2'-deoxy-2'-fluoro-adenosine-3'-phosphate
  modified_base 7: mod_base = OTHER; note = 2'-O-methyl-adenosine-3'-phosphate
  modified_base 8: mod_base = OTHER; note = 2'-deoxy-2'-fluoro-cytidine-3'-phosphate
  modified_base 9: mod_base = OTHER; note = 2'-deoxy-2'-fluoro-uridine-3'-phosphate
  modified_base 10: mod_base = OTHER; note = 2'-O-methyl-guanosine-3'-phosphate
  modified_base 11: mod_base = OTHER; note = 2'-O-methyl-uridine-3'-phosphate
  modified_base 12: mod_base = OTHER; note = 2'-O-methyl-cytidine-3'-phosphate
  modified_base 13: mod_base = OTHER; note = 2'-O-methyl-uridine-3'-phosphate
  modified_base 14: mod_base = OTHER; note = 2'-deoxy-2'-fluoro-uridine-3'-phosphate
  modified_base 15: mod_base = OTHER; note = 2'-O-methyl-cytidine-3'-phosphate
  modified_base 16: mod_base = OTHER; note = 2'-deoxy-2'-fluoro-uridine-3'-phosphate
  modified_base 17: mod_base = OTHER; note = 2'-O-methyl-uridine-3'-phosphate
  modified_base 18: mod_base = OTHER; note = 2'-O-methyl-uridine-3'-phosphate
  modified_base 19: mod_base = OTHER; note = 2'-O-methyl-uridine-3'-phosphorothioate
  modified_base 20: mod_base = OTHER; note = 2'-O-methyl-uridine-3'-phosphorothioate
  modified_base 21: mod_base = OTHER; note = 2'-O-methyl-uridine-3'-phosphate
tagataactgtcttctttttt

SEQ ID NO: 2247 - RNA, 21 nt, synthetic construct
  source 1..21: mol_type = other RNA
  modified_base 1: mod_base = OTHER; note = 2'-O-methyl-uridine-3'-phosphorothioate
  modified_base 2: mod_base = OTHER; note = 2'-deoxy-2'-fluoro-guanosine-3'-phosphorothioate
  modified_base 3: mod_base = OTHER; note = 2'-O-methyl-adenosine-3'-phosphate
  modified_base 4: mod_base = OTHER; note = 2'-O-methyl-guanosine-3'-phosphate
  modified_base 5: mod_base = OTHER; note = 2'-O-methyl-adenosine-3'-phosphate
  modified_base 6: mod_base = OTHER; note = 2'-deoxy-2'-fluoro-uridine-3'-phosphate
  modified_base 7: mod_base = OTHER; note = 2'-O-methyl-adenosine-3'-phosphate
  modified_base 8: mod_base = OTHER; note = 2'-deoxy-2'-fluoro-adenosine-3'-phosphate
  modified_base 9: mod_base = OTHER; note = 2'-deoxy-2'-fluoro-cytidine-3'-phosphate
  modified_base 10: mod_base = OTHER; note = 2'-O-methyl-uridine-3'-phosphate
  modified_base 11: mod_base = OTHER; note = 2'-O-methyl-guanosine-3'-phosphate
  modified_base 12: mod_base = OTHER; note = 2'-O-methyl-uridine-3'-phosphate
  modified_base 13: mod_base = OTHER; note = 2'-O-methyl-cytidine-3'-phosphate
  modified_base 14: mod_base = OTHER; note = 2'-deoxy-2'-fluoro-uridine-3'-phosphate
  modified_base 15: mod_base = OTHER; note = 2'-O-methyl-uridine-3'-phosphate
  modified_base 16: mod_base = OTHER; note = 2'-deoxy-2'-fluoro-cytidine-3'-phosphate
  modified_base 17: mod_base = OTHER; note = 2'-O-methyl-uridine-3'-phosphate
  modified_base 18: mod_base = OTHER; note = 2'-O-methyl-uridine-3'-phosphate
  modified_base 19: mod_base = OTHER; note = 2'-O-methyl-uridine-3'-phosphorothioate
  modified_base 20: mod_base = OTHER; note = 2'-O-methyl-uridine-3'-phosphorothioate
  modified_base 21: mod_base = OTHER; note = 2'-O-methyl-uridine-3'-phosphate
tgagataactgtcttcttttt

SEQ ID NO: 2248 - RNA, 21 nt, synthetic construct
  source 1..21: mol_type = other RNA
  modified_base 1: mod_base = OTHER; note = 2'-O-methyl-uridine-3'-phosphorothioate
  modified_base 2: mod_base = OTHER; note = 2'-deoxy-2'-fluoro-uridine-3'-phosphorothioate
  modified_base 3: mod_base = OTHER; note = 2'-O-methyl-guanosine-3'-phosphate
  modified_base 4: mod_base = OTHER; note = 2'-O-methyl-adenosine-3'-phosphate
  modified_base 5: mod_base = OTHER; note = 2'-O-methyl-guanosine-3'-phosphate
  modified_base 6: mod_base = OTHER; note = 2'-deoxy-2'-fluoro-adenosine-3'-phosphate
  modified_base 7: mod_base = OTHER; note = 2'-O-methyl-uridine-3'-phosphate
  modified_base 8: mod_base = OTHER; note = 2'-deoxy-2'-fluoro-adenosine-3'-phosphate
  modified_base 9: mod_base = OTHER; note = 2'-deoxy-2'-fluoro-adenosine-3'-phosphate
  modified_base 10: mod_base = OTHER; note = 2'-O-methyl-cytidine-3'-phosphate
  modified_base 11: mod_base = OTHER; note = 2'-O-methyl-uridine-3'-phosphate
  modified_base 12: mod_base = OTHER; note = 2'-O-methyl-guanosine-3'-phosphate
  modified_base 13: mod_base = OTHER; note = 2'-O-methyl-uridine-3'-phosphate
  modified_base 14: mod_base = OTHER; note = 2'-deoxy-2'-fluoro-cytidine-3'-phosphate
  modified_base 15: mod_base = OTHER; note = 2'-O-methyl-uridine-3'-phosphate
  modified_base 16: mod_base = OTHER; note = 2'-deoxy-2'-fluoro-uridine-3'-phosphate
  modified_base 17: mod_base = OTHER; note = 2'-O-methyl-cytidine-3'-phosphate
  modified_base 18: mod_base = OTHER; note = 2'-O-methyl-uridine-3'-phosphate
  modified_base 19: mod_base = OTHER; note = 2'-O-methyl-uridine-3'-phosphorothioate
  modified_base 20: mod_base = OTHER; note = 2'-O-methyl-uridine-3'-phosphorothioate
  modified_base 21: mod_base = OTHER; note = 2'-O-methyl-uridine-3'-phosphate
ttgagataactgtcttctttt

SEQ ID NO: 2249 - RNA, 21 nt, synthetic construct
  source 1..21: mol_type = other RNA
  modified_base 1: mod_base = OTHER; note = 2'-O-methyl-uridine-3'-phosphorothioate
  modified_base 2: mod_base = OTHER; note = 2'-deoxy-2'-fluoro-adenosine-3'-phosphorothioate
  modified_base 3: mod_base = OTHER; note = 2'-O-methyl-uridine-3'-phosphate
  modified_base 4: mod_base = OTHER; note = 2'-O-methyl-guanosine-3'-phosphate
  modified_base 5: mod_base = OTHER; note = 2'-O-methyl-adenosine-3'-phosphate
  modified_base 6: mod_base = OTHER; note = 2'-deoxy-2'-fluoro-guanosine-3'-phosphate
  modified_base 7: mod_base = OTHER; note = 2'-O-methyl-adenosine-3'-phosphate
  modified_base 8: mod_base = OTHER; note = 2'-deoxy-2'-fluoro-uridine-3'-phosphate
  modified_base 9: mod_base = OTHER; note = 2'-deoxy-2'-fluoro-adenosine-3'-phosphate
  modified_base 10: mod_base = OTHER; note = 2'-O-methyl-adenosine-3'-phosphate
  modified_base 11: mod_base = OTHER; note = 2'-O-methyl-cytidine-3'-phosphate
  modified_base 12: mod_base = OTHER; note = 2'-O-methyl-uridine-3'-phosphate
  modified_base 13: mod_base = OTHER; note = 2'-O-methyl-guanosine-3'-phosphate
  modified_base 14: mod_base = OTHER; note = 2'-deoxy-2'-fluoro-uridine-3'-phosphate
  modified_base 15: mod_base = OTHER; note = 2'-O-methyl-cytidine-3'-phosphate
  modified_base 16: mod_base = OTHER; note = 2'-deoxy-2'-fluoro-uridine-3'-phosphate
  modified_base 17: mod_base = OTHER; note = 2'-O-methyl-uridine-3'-phosphate
  modified_base 18: mod_base = OTHER; note = 2'-O-methyl-cytidine-3'-phosphate
  modified_base 19: mod_base = OTHER; note = 2'-O-methyl-uridine-3'-phosphorothioate
  modified_base 20: mod_base = OTHER; note = 2'-O-methyl-uridine-3'-phosphorothioate
  modified_base 21: mod_base = OTHER; note = 2'-O-methyl-uridine-3'-phosphate
tatgagataactgtcttcttt

SEQ ID NO: 2250 - RNA, 21 nt, synthetic construct
  source 1..21: mol_type = other RNA
  modified_base 1: mod_base = OTHER; note = 2'-O-methyl-uridine-3'-phosphorothioate
  modified_base 2: mod_base = OTHER; note = 2'-deoxy-2'-fluoro-adenosine-3'-phosphorothioate
  modified_base 3: mod_base = OTHER; note = 2'-O-methyl-adenosine-3'-phosphate
  modified_base 4: mod_base = OTHER; note = 2'-O-methyl-uridine-3'-phosphate
  modified_base 5: mod_base = OTHER; note = 2'-O-methyl-adenosine-3'-phosphate
  modified_base 6: mod_base = OTHER; note = 2'-deoxy-2'-fluoro-uridine-3'-phosphate
  modified_base 7: mod_base = OTHER; note = 2'-O-methyl-guanosine-3'-phosphate
  modified_base 8: mod_base = OTHER; note = 2'-deoxy-2'-fluoro-adenosine-3'-phosphate
  modified_base 9: mod_base = OTHER; note = 2'-deoxy-2'-fluoro-guanosine-3'-phosphate
  modified_base 10: mod_base = OTHER; note = 2'-O-methyl-adenosine-3'-phosphate
  modified_base 11: mod_base = OTHER; note = 2'-O-methyl-uridine-3'-phosphate
  modified_base 12: mod_base = OTHER; note = 2'-O-methyl-adenosine-3'-phosphate
  modified_base 13: mod_base = OTHER; note = 2'-O-methyl-adenosine-3'-phosphate
  modified_base 14: mod_base = OTHER; note = 2'-deoxy-2'-fluoro-cytidine-3'-phosphate
  modified_base 15: mod_base = OTHER; note = 2'-O-methyl-uridine-3'-phosphate
  modified_base 16: mod_base = OTHER; note = 2'-deoxy-2'-fluoro-guanosine-3'-phosphate
  modified_base 17: mod_base = OTHER; note = 2'-O-methyl-uridine-3'-phosphate
  modified_base 18: mod_base = OTHER; note = 2'-O-methyl-cytidine-3'-phosphate
  modified_base 19: mod_base = OTHER; note = 2'-O-methyl-uridine-3'-phosphorothioate
  modified_base 20: mod_base = OTHER; note = 2'-O-methyl-uridine-3'-phosphorothioate
  modified_base 21: mod_base = OTHER; note = 2'-O-methyl-uridine-3'-phosphate
taatatgagataactgtcttt

SEQ ID NO: 2251 - RNA, 21 nt, synthetic construct
  source 1..21: mol_type = other RNA
  modified_base 1: mod_base = OTHER; note = 2'-O-methyl-uridine-3'-phosphorothioate
  modified_base 2: mod_base = OTHER; note = 2'-deoxy-2'-fluoro-adenosine-3'-phosphorothioate
  modified_base 3: mod_base = OTHER; note = 2'-O-methyl-adenosine-3'-phosphate
  modified_base 4: mod_base = OTHER; note = 2'-O-methyl-adenosine-3'-phosphate
  modified_base 5: mod_base = OTHER; note = 2'-O-methyl-uridine-3'-phosphate
  modified_base 6: mod_base = OTHER; note = 2'-deoxy-2'-fluoro-adenosine-3'-phosphate
  modified_base 7: mod_base = OTHER; note = 2'-O-methyl-uridine-3'-phosphate
  modified_base 8: mod_base = OTHER; note = 2'-deoxy-2'-fluoro-guanosine-3'-phosphate
  modified_base 9: mod_base = OTHER; note = 2'-deoxy-2'-fluoro-adenosine-3'-phosphate
  modified_base 10: mod_base = OTHER; note = 2'-O-methyl-guanosine-3'-phosphate
  modified_base 11: mod_base = OTHER; note = 2'-O-methyl-adenosine-3'-phosphate
  modified_base 12: mod_base = OTHER; note = 2'-O-methyl-uridine-3'-phosphate
  modified_base 13: mod_base = OTHER; note = 2'-O-methyl-adenosine-3'-phosphate
  modified_base 14: mod_base = OTHER; note = 2'-deoxy-2'-fluoro-adenosine-3'-phosphate
  modified_base 15: mod_base = OTHER; note = 2'-O-methyl-cytidine-3'-phosphate
  modified_base 16: mod_base = OTHER; note = 2'-deoxy-2'-fluoro-uridine-3'-phosphate
  modified_base 17: mod_base = OTHER; note = 2'-O-methyl-guanosine-3'-phosphate
  modified_base 18: mod_base = OTHER; note = 2'-O-methyl-uridine-3'-phosphate
  modified_base 19: mod_base = OTHER; note = 2'-O-methyl-cytidine-3'-phosphorothioate
  modified_base 20: mod_base = OTHER; note = 2'-O-methyl-uridine-3'-phosphorothioate
  modified_base 21: mod_base = OTHER; note = 2'-O-methyl-uridine-3'-phosphate
taaatatgagataactgtctt

SEQ ID NO: 2252 - RNA, 21 nt, synthetic construct
  source 1..21: mol_type = other RNA
  modified_base 1: mod_base = OTHER; note = 2'-O-methyl-uridine-3'-phosphorothioate
  modified_base 2: mod_base = OTHER; note = 2'-deoxy-2'-fluoro-cytidine-3'-phosphorothioate
  modified_base 3: mod_base = OTHER; note = 2'-O-methyl-cytidine-3'-phosphate
  modified_base 4: mod_base = OTHER; note = 2'-O-methyl-adenosine-3'-phosphate
  modified_base 5: mod_base = OTHER; note = 2'-O-methyl-adenosine-3'-phosphate
  modified_base 6: mod_base = OTHER; note = 2'-deoxy-2'-fluoro-adenosine-3'-phosphate
  modified_base 7: mod_base = OTHER; note = 2'-O-methyl-uridine-3'-phosphate
  modified_base 8: mod_base = OTHER; note = 2'-deoxy-2'-fluoro-adenosine-3'-phosphate
  modified_base 9: mod_base = OTHER; note = 2'-deoxy-2'-fluoro-uridine-3'-phosphate
  modified_base 10: mod_base = OTHER; note = 2'-O-methyl-guanosine-3'-phosphate
  modified_base 11: mod_base = OTHER; note = 2'-O-methyl-adenosine-3'-phosphate
  modified_base 12: mod_base = OTHER; note = 2'-O-methyl-guanosine-3'-phosphate
  modified_base 13: mod_base = OTHER; note = 2'-O-methyl-adenosine-3'-phosphate
  modified_base 14: mod_base = OTHER; note = 2'-deoxy-2'-fluoro-uridine-3'-phosphate
  modified_base 15: mod_base = OTHER; note = 2'-O-methyl-adenosine-3'-phosphate
  modified_base 16: mod_base = OTHER; note = 2'-deoxy-2'-fluoro-adenosine-3'-phosphate
  modified_base 17: mod_base = OTHER; note = 2'-O-methyl-cytidine-3'-phosphate
  modified_base 18: mod_base = OTHER; note = 2'-O-methyl-uridine-3'-phosphate
  modified_base 19: mod_base = OTHER; note = 2'-O-methyl-guanosine-3'-phosphorothioate
  modified_base 20: mod_base = OTHER; note = 2'-O-methyl-uridine-3'-phosphorothioate
  modified_base 21: mod_base = OTHER; note = 2'-O-methyl-uridine-3'-phosphate
tccaaatatgagataactgtt

SEQ ID NO: 2253 - RNA, 21 nt, synthetic construct
  source 1..21: mol_type = other RNA
  modified_base 1: mod_base = OTHER; note = 2'-O-methyl-uridine-3'-phosphorothioate
  modified_base 2: mod_base = OTHER; note = 2'-deoxy-2'-fluoro-guanosine-3'-phosphorothioate
  modified_base 3: mod_base = OTHER; note = 2'-O-methyl-adenosine-3'-phosphate
  modified_base 4: mod_base = OTHER; note = 2'-O-methyl-adenosine-3'-phosphate
  modified_base 5: mod_base = OTHER; note = 2'-O-methyl-guanosine-3'-phosphate
  modified_base 6: mod_base = OTHER; note = 2'-deoxy-2'-fluoro-uridine-3'-phosphate
  modified_base 7: mod_base = OTHER; note = 2'-O-methyl-cytidine-3'-phosphate
  modified_base 8: mod_base = OTHER; note = 2'-deoxy-2'-fluoro-uridine-3'-phosphate
  modified_base 9: mod_base = OTHER; note = 2'-deoxy-2'-fluoro-guanosine-3'-phosphate
  modified_base 10: mod_base = OTHER; note = 2'-O-methyl-adenosine-3'-phosphate
  modified_base 11: mod_base = OTHER; note = 2'-O-methyl-adenosine-3'-phosphate
  modified_base 12: mod_base = OTHER; note = 2'-O-methyl-guanosine-3'-phosphate
  modified_base 13: mod_base = OTHER; note = 2'-O-methyl-uridine-3'-phosphate
  modified_base 14: mod_base = OTHER; note = 2'-deoxy-2'-fluoro-uridine-3'-phosphate
  modified_base 15: mod_base = OTHER; note = 2'-O-methyl-uridine-3'-phosphate
  modified_base 16: mod_base = OTHER; note = 2'-deoxy-2'-fluoro-uridine-3'-phosphate
  modified_base 17: mod_base = OTHER; note = 2'-O-methyl-adenosine-3'-phosphate
  modified_base 18: mod_base = OTHER; note = 2'-O-methyl-adenosine-3'-phosphate
  modified_base 19: mod_base = OTHER; note = 2'-O-methyl-guanosine-3'-phosphorothioate
  modified_base 20: mod_base = OTHER; note = 2'-O-methyl-uridine-3'-phosphorothioate
  modified_base 21: mod_base = OTHER; note = 2'-O-methyl-uridine-3'-phosphate
tgaagtctgaagttttaagtt

SEQ ID NO: 2254 - RNA, 21 nt, synthetic construct
  source 1..21: mol_type = other RNA
  modified_base 1: mod_base = OTHER; note = 2'-O-methyl-uridine-3'-phosphorothioate
  modified_base 2: mod_base = OTHER; note = 2'-deoxy-2'-fluoro-adenosine-3'-phosphorothioate
  modified_base 3: mod_base = OTHER; note = 2'-O-methyl-guanosine-3'-phosphate
  modified_base 4: mod_base = OTHER; note = 2'-O-methyl-guanosine-3'-phosphate
  modified_base 5: mod_base = OTHER; note = 2'-O-methyl-adenosine-3'-phosphate
  modified_base 6: mod_base = OTHER; note = 2'-deoxy-2'-fluoro-adenosine-3'-phosphate
  modified_base 7: mod_base = OTHER; note = 2'-O-methyl-guanosine-3'-phosphate
  modified_base 8: mod_base = OTHER; note = 2'-deoxy-2'-fluoro-uridine-3'-phosphate
  modified_base 9: mod_base = OTHER; note = 2'-deoxy-2'-fluoro-cytidine-3'-phosphate
  modified_base 10: mod_base = OTHER; note = 2'-O-methyl-uridine-3'-phosphate
  modified_base 11: mod_base = OTHER; note = 2'-O-methyl-guanosine-3'-phosphate
  modified_base 12: mod_base = OTHER; note = 2'-O-methyl-adenosine-3'-phosphate
  modified_base 13: mod_base = OTHER; note = 2'-O-methyl-adenosine-3'-phosphate
  modified_base 14: mod_base = OTHER; note = 2'-deoxy-2'-fluoro-guanosine-3'-phosphate
  modified_base 15: mod_base = OTHER; note = 2'-O-methyl-uridine-3'-phosphate
  modified_base 16: mod_base = OTHER; note = 2'-deoxy-2'-fluoro-uridine-3'-phosphate
  modified_base 17: mod_base = OTHER; note = 2'-O-methyl-uridine-3'-phosphate
  modified_base 18: mod_base = OTHER; note = 2'-O-methyl-uridine-3'-phosphate
  modified_base 19: mod_base = OTHER; note = 2'-O-methyl-adenosine-3'-phosphorothioate
  modified_base 20: mod_base = OTHER; note = 2'-O-methyl-uridine-3'-phosphorothioate
  modified_base 21: mod_base = OTHER; note = 2'-O-methyl-uridine-3'-phosphate
taggaagtctgaagttttatt

SEQ ID NO: 2255 - RNA, 21 nt, synthetic construct
  source 1..21: mol_type = other RNA
  modified_base 1: mod_base = OTHER; note = 2'-O-methyl-uridine-3'-phosphorothioate
  modified_base 2: mod_base = OTHER; note = 2'-deoxy-2'-fluoro-cytidine-3'-phosphorothioate
  modified_base 3: mod_base = OTHER; note = 2'-O-methyl-cytidine-3'-phosphate
  modified_base 4: mod_base = OTHER; note = 2'-O-methyl-adenosine-3'-phosphate
  modified_base 5: mod_base = OTHER; note = 2'-O-methyl-uridine-3'-phosphate
  modified_base 6: mod_base = OTHER; note = 2'-deoxy-2'-fluoro-guanosine-3'-phosphate
  modified_base 7: mod_base = OTHER; note = 2'-O-methyl-adenosine-3'-phosphate
  modified_base 8: mod_base = OTHER; note = 2'-deoxy-2'-fluoro-uridine-3'-phosphate
  modified_base 9: mod_base = OTHER; note = 2'-deoxy-2'-fluoro-adenosine-3'-phosphate
  modified_base 10: mod_base = OTHER; note = 2'-O-methyl-cytidine-3'-phosphate
  modified_base 11: mod_base = OTHER; note = 2'-O-methyl-cytidine-3'-phosphate
  modified_base 12: mod_base = OTHER; note = 2'-O-methyl-adenosine-3'-phosphate
  modified_base 13: mod_base = OTHER; note = 2'-O-methyl-guanosine-3'-phosphate
  modified_base 14: mod_base = OTHER; note = 2'-deoxy-2'-fluoro-cytidine-3'-phosphate
  modified_base 15: mod_base = OTHER; note = 2'-O-methyl-adenosine-3'-phosphate
  modified_base 16: mod_base = OTHER; note = 2'-deoxy-2'-fluoro-guanosine-3'-phosphate
  modified_base 17: mod_base = OTHER; note = 2'-O-methyl-guanosine-3'-phosphate
  modified_base 18: mod_base = OTHER; note = 2'-O-methyl-adenosine-3'-phosphate
  modified_base 19: mod_base = OTHER; note = 2'-O-methyl-cytidine-3'-phosphorothioate
  modified_base 20: mod_base = OTHER; note = 2'-O-methyl-uridine-3'-phosphorothioate
  modified_base 21: mod_base = OTHER; note = 2'-O-methyl-uridine-3'-phosphate
tccatgataccagcaggactt

SEQ ID NO: 2256 - RNA, 21 nt, synthetic construct
  source 1..21: mol_type = other RNA
  modified_base 1: mod_base = OTHER; note = 2'-O-methyl-uridine-3'-phosphorothioate
  modified_base 2: mod_base = OTHER; note = 2'-deoxy-2'-fluoro-uridine-3'-phosphorothioate
  modified_base 3: mod_base = OTHER; note = 2'-O-methyl-cytidine-3'-phosphate
  modified_base 4: mod_base = OTHER; note = 2'-O-methyl-cytidine-3'-phosphate
  modified_base 5: mod_base = OTHER; note = 2'-O-methyl-adenosine-3'-phosphate
  modified_base 6: mod_base = OTHER; note = 2'-deoxy-2'-fluoro-uridine-3'-phosphate
  modified_base 7: mod_base = OTHER; note = 2'-O-methyl-guanosine-3'-phosphate
  modified_base 8: mod_base = OTHER; note = 2'-deoxy-2'-fluoro-adenosine-3'-phosphate
  modified_base 9: mod_base = OTHER; note = 2'-deoxy-2'-fluoro-uridine-3'-phosphate
  modified_base 10: mod_base = OTHER; note = 2'-O-methyl-adenosine-3'-phosphate
  modified_base 11: mod_base = OTHER; note = 2'-O-methyl-cytidine-3'-phosphate
  modified_base 12: mod_base = OTHER; note = 2'-O-methyl-cytidine-3'-phosphate
  modified_base 13: mod_base = OTHER; note = 2'-O-methyl-adenosine-3'-phosphate
  modified_base 14: mod_base = OTHER; note = 2'-deoxy-2'-fluoro-guanosine-3'-phosphate
  modified_base 15: mod_base = OTHER; note = 2'-O-methyl-cytidine-3'-phosphate
  modified_base 16: mod_base = OTHER; note = 2'-deoxy-2'-fluoro-adenosine-3'-phosphate
  modified_base 17: mod_base = OTHER; note = 2'-O-methyl-guanosine-3'-phosphate
  modified_base 18: mod_base = OTHER; note = 2'-O-methyl-guanosine-3'-phosphate
  modified_base 19: mod_base = OTHER; note = 2'-O-methyl-adenosine-3'-phosphorothioate
  modified_base 20: mod_base = OTHER; note = 2'-O-methyl-uridine-3'-phosphorothioate
  modified_base 21: mod_base = OTHER; note = 2'-O-methyl-uridine-3'-phosphate
ttccatgataccagcaggatt

SEQ ID NO: 2257 - RNA, 21 nt, synthetic construct
  source 1..21: mol_type = other RNA
  modified_base 1: mod_base = OTHER; note = 2'-O-methyl-uridine-3'-phosphorothioate
  modified_base 2: mod_base = OTHER; note = 2'-deoxy-2'-fluoro-cytidine-3'-phosphorothioate
  modified_base 3: mod_base = OTHER; note = 2'-O-methyl-uridine-3'-phosphate
  modified_base 4: mod_base = OTHER; note = 2'-O-methyl-cytidine-3'-phosphate
  modified_base 5: mod_base = OTHER; note = 2'-O-methyl-cytidine-3'-phosphate
  modified_base 6: mod_base = OTHER; note = 2'-deoxy-2'-fluoro-adenosine-3'-phosphate
  modified_base 7: mod_base = OTHER; note = 2'-O-methyl-uridine-3'-phosphate
  modified_base 8: mod_base = OTHER; note = 2'-deoxy-2'-fluoro-guanosine-3'-phosphate
  modified_base 9: mod_base = OTHER; note = 2'-deoxy-2'-fluoro-adenosine-3'-phosphate
  modified_base 10: mod_base = OTHER; note = 2'-O-methyl-uridine-3'-phosphate
  modified_base 11: mod_base = OTHER; note = 2'-O-methyl-adenosine-3'-phosphate
  modified_base 12: mod_base = OTHER; note = 2'-O-methyl-cytidine-3'-phosphate
  modified_base 13: mod_base = OTHER; note = 2'-O-methyl-cytidine-3'-phosphate
  modified_base 14: mod_base = OTHER; note = 2'-deoxy-2'-fluoro-adenosine-3'-phosphate
  modified_base 15: mod_base = OTHER; note = 2'-O-methyl-guanosine-3'-phosphate
  modified_base 16: mod_base = OTHER; note = 2'-deoxy-2'-fluoro-cytidine-3'-phosphate
  modified_base 17: mod_base = OTHER; note = 2'-O-methyl-adenosine-3'-phosphate
  modified_base 18: mod_base = OTHER; note = 2'-O-methyl-guanosine-3'-phosphate
  modified_base 19: mod_base = OTHER; note = 2'-O-methyl-guanosine-3'-phosphorothioate
  modified_base 20: mod_base = OTHER; note = 2'-O-methyl-uridine-3'-phosphorothioate
  modified_base 21: mod_base = OTHER; note = 2'-O-methyl-uridine-3'-phosphate
tctccatgataccagcaggtt

SEQ ID NO: 2258 - RNA, 21 nt, synthetic construct
  source 1..21: mol_type = other RNA
  modified_base 1: mod_base = OTHER; note = 2'-O-methyl-uridine-3'-phosphorothioate
  modified_base 2: mod_base = OTHER; note = 2'-deoxy-2'-fluoro-uridine-3'-phosphorothioate
  modified_base 3: mod_base = OTHER; note = 2'-O-methyl-cytidine-3'-phosphate
  modified_base 4: mod_base = OTHER; note = 2'-O-methyl-uridine-3'-phosphate
  modified_base 5: mod_base = OTHER; note = 2'-O-methyl-cytidine-3'-phosphate
  modified_base 6: mod_base = OTHER; note = 2'-deoxy-2'-fluoro-cytidine-3'-phosphate
  modified_base 7: mod_base = OTHER; note = 2'-O-methyl-adenosine-3'-phosphate
  modified_base 8: mod_base = OTHER; note = 2'-deoxy-2'-fluoro-uridine-3'-phosphate
  modified_base 9: mod_base = OTHER; note = 2'-deoxy-2'-fluoro-guanosine-3'-phosphate
  modified_base 10: mod_base = OTHER; note = 2'-O-methyl-adenosine-3'-phosphate
  modified_base 11: mod_base = OTHER; note = 2'-O-methyl-uridine-3'-phosphate
  modified_base 12: mod_base = OTHER; note = 2'-O-methyl-adenosine-3'-phosphate
  modified_base 13: mod_base = OTHER; note = 2'-O-methyl-cytidine-3'-phosphate
  modified_base 14: mod_base = OTHER; note = 2'-deoxy-2'-fluoro-cytidine-3'-phosphate
  modified_base 15: mod_base = OTHER; note = 2'-O-methyl-adenosine-3'-phosphate
  modified_base 16: mod_base = OTHER; note = 2'-deoxy-2'-fluoro-guanosine-3'-phosphate
  modified_base 17: mod_base = OTHER; note = 2'-O-methyl-cytidine-3'-phosphate
  modified_base 18: mod_base = OTHER; note = 2'-O-methyl-adenosine-3'-phosphate
  modified_base 19: mod_base = OTHER; note = 2'-O-methyl-guanosine-3'-phosphorothioate
  modified_base 20: mod_base = OTHER; note = 2'-O-methyl-uridine-3'-phosphorothioate
  modified_base 21: mod_base = OTHER; note = 2'-O-methyl-uridine-3'-phosphate
ttctccatgataccagcagtt

SEQ ID NO: 2259 - RNA, 21 nt, synthetic construct
  source 1..21: mol_type = other RNA
  modified_base 1: mod_base = OTHER; note = 2'-O-methyl-uridine-3'-phosphorothioate
  modified_base 2: mod_base = OTHER; note = 2'-deoxy-2'-fluoro-uridine-3'-phosphorothioate
  modified_base 3: mod_base = OTHER; note = 2'-O-methyl-uridine-3'-phosphate
  modified_base 4: mod_base = OTHER; note = 2'-O-methyl-cytidine-3'-phosphate
  modified_base 5: mod_base = OTHER; note = 2'-O-methyl-uridine-3'-phosphate
  modified_base 6: mod_base = OTHER; note = 2'-deoxy-2'-fluoro-cytidine-3'-phosphate
  modified_base 7: mod_base = OTHER; note = 2'-O-methyl-cytidine-3'-phosphate
  modified_base 8: mod_base = OTHER; note = 2'-deoxy-2'-fluoro-adenosine-3'-phosphate
  modified_base 9: mod_base = OTHER; note = 2'-deoxy-2'-fluoro-uridine-3'-phosphate
  modified_base 10: mod_base = OTHER; note = 2'-O-methyl-guanosine-3'-phosphate
  modified_base 11: mod_base = OTHER; note = 2'-O-methyl-adenosine-3'-phosphate
  modified_base 12: mod_base = OTHER; note = 2'-O-methyl-uridine-3'-phosphate
  modified_base 13: mod_base = OTHER; note = 2'-O-methyl-adenosine-3'-phosphate
  modified_base 14: mod_base = OTHER; note = 2'-deoxy-2'-fluoro-cytidine-3'-phosphate
  modified_base 15: mod_base = OTHER; note = 2'-O-methyl-cytidine-3'-phosphate
  modified_base 16: mod_base = OTHER; note = 2'-deoxy-2'-fluoro-adenosine-3'-phosphate
  modified_base 17: mod_base = OTHER; note = 2'-O-methyl-guanosine-3'-phosphate
  modified_base 18: mod_base = OTHER; note = 2'-O-methyl-cytidine-3'-phosphate
  modified_base 19: mod_base = OTHER; note = 2'-O-methyl-adenosine-3'-phosphorothioate
  modified_base 20: mod_base = OTHER; note = 2'-O-methyl-uridine-3'-phosphorothioate
  modified_base 21: mod_base = OTHER; note = 2'-O-methyl-uridine-3'-phosphate
tttctccatgataccagcatt

SEQ ID NO: 2260 - RNA, 21 nt, synthetic construct
  source 1..21: mol_type = other RNA
  modified_base 1: mod_base = OTHER; note = 2'-O-methyl-uridine-3'-phosphorothioate
  modified_base 2: mod_base = OTHER; note = 2'-deoxy-2'-fluoro-uridine-3'-phosphorothioate
  modified_base 3: mod_base = OTHER; note = 2'-O-methyl-uridine-3'-phosphate
  modified_base 4: mod_base = OTHER; note = 2'-O-methyl-uridine-3'-phosphate
  modified_base 5: mod_base = OTHER; note = 2'-O-methyl-cytidine-3'-phosphate
  modified_base 6: mod_base = OTHER; note = 2'-deoxy-2'-fluoro-uridine-3'-phosphate
  modified_base 7: mod_base = OTHER; note = 2'-O-methyl-cytidine-3'-phosphate
  modified_base 8: mod_base = OTHER; note = 2'-deoxy-2'-fluoro-cytidine-3'-phosphate
  modified_base 9: mod_base = OTHER; note = 2'-deoxy-2'-fluoro-adenosine-3'-phosphate
  modified_base 10: mod_base = OTHER; note = 2'-O-methyl-uridine-3'-phosphate
  modified_base 11: mod_base = OTHER; note = 2'-O-methyl-guanosine-3'-phosphate
  modified_base 12: mod_base = OTHER; note = 2'-O-methyl-adenosine-3'-phosphate
  modified_base 13: mod_base = OTHER; note = 2'-O-methyl-uridine-3'-phosphate
  modified_base 14: mod_base = OTHER; note = 2'-deoxy-2'-fluoro-adenosine-3'-phosphate
  modified_base 15: mod_base = OTHER; note = 2'-O-methyl-cytidine-3'-phosphate
  modified_base 16: mod_base = OTHER; note = 2'-deoxy-2'-fluoro-cytidine-3'-phosphate
  modified_base 17: mod_base = OTHER; note = 2'-O-methyl-adenosine-3'-phosphate
  modified_base 18: mod_base = OTHER; note = 2'-O-methyl-guanosine-3'-phosphate
  modified_base 19: mod_base = OTHER; note = 2'-O-methyl-cytidine-3'-phosphorothioate
  modified_base 20: mod_base = OTHER; note = 2'-O-methyl-uridine-3'-phosphorothioate
  modified_base 21: mod_base = OTHER; note = 2'-O-methyl-uridine-3'-phosphate
ttttctccatgataccagctt

SEQ ID NO: 2261 - RNA, 21 nt, synthetic construct
  source 1..21: mol_type = other RNA
  modified_base 1: mod_base = OTHER; note = 2'-O-methyl-uridine-3'-phosphorothioate
  modified_base 2: mod_base = OTHER; note = 2'-deoxy-2'-fluoro-cytidine-3'-phosphorothioate
  modified_base 3: mod_base = OTHER; note = 2'-O-methyl-uridine-3'-phosphate
  modified_base 4: mod_base = OTHER; note = 2'-O-methyl-uridine-3'-phosphate
  modified_base 5: mod_base = OTHER; note = 2'-O-methyl-uridine-3'-phosphate
  modified_base 6: mod_base = OTHER; note = 2'-deoxy-2'-fluoro-cytidine-3'-phosphate
  modified_base 7: mod_base = OTHER; note = 2'-O-methyl-uridine-3'-phosphate
  modified_base 8: mod_base = OTHER; note = 2'-deoxy-2'-fluoro-cytidine-3'-phosphate
  modified_base 9: mod_base = OTHER; note = 2'-deoxy-2'-fluoro-cytidine-3'-phosphate
  modified_base 10: mod_base = OTHER; note = 2'-O-methyl-adenosine-3'-phosphate
  modified_base 11: mod_base = OTHER; note = 2'-O-methyl-uridine-3'-phosphate
  modified_base 12: mod_base = OTHER; note = 2'-O-methyl-guanosine-3'-phosphate
  modified_base 13: mod_base = OTHER; note = 2'-O-methyl-adenosine-3'-phosphate
  modified_base 14: mod_base = OTHER; note = 2'-deoxy-2'-fluoro-uridine-3'-phosphate
  modified_base 15: mod_base = OTHER; note = 2'-O-methyl-adenosine-3'-phosphate
  modified_base 16: mod_base = OTHER; note = 2'-deoxy-2'-fluoro-cytidine-3'-phosphate
  modified_base 17: mod_base = OTHER; note = 2'-O-methyl-cytidine-3'-phosphate
  modified_base 18: mod_base = OTHER; note = 2'-O-methyl-adenosine-3'-phosphate
  modified_base 19: mod_base = OTHER; note = 2'-O-methyl-guanosine-3'-phosphorothioate
  modified_base 20: mod_base = OTHER; note = 2'-O-methyl-uridine-3'-phosphorothioate
  modified_base 21: mod_base = OTHER; note = 2'-O-methyl-uridine-3'-phosphate
tctttctccatgataccagtt

SEQ ID NO: 2262 - RNA, 21 nt, synthetic construct
  source 1..21: mol_type = other RNA
  modified_base 1: mod_base = OTHER; note = 2'-O-methyl-uridine-3'-phosphorothioate
  modified_base 2: mod_base = OTHER; note = 2'-deoxy-2'-fluoro-adenosine-3'-phosphorothioate
  modified_base 3: mod_base = OTHER; note = 2'-O-methyl-cytidine-3'-phosphate
  modified_base 4: mod_base = OTHER; note = 2'-O-methyl-uridine-3'-phosphate
  modified_base 5: mod_base = OTHER; note = 2'-O-methyl-uridine-3'-phosphate
  modified_base 6: mod_base = OTHER; note = 2'-deoxy-2'-fluoro-uridine-3'-phosphate
  modified_base 7: mod_base = OTHER; note = 2'-O-methyl-cytidine-3'-phosphate
  modified_base 8: mod_base = OTHER; note = 2'-deoxy-2'-fluoro-uridine-3'-phosphate
  modified_base 9: mod_base = OTHER; note = 2'-deoxy-2'-fluoro-cytidine-3'-phosphate
  modified_base 10: mod_base = OTHER; note = 2'-O-methyl-cytidine-3'-phosphate
  modified_base 11: mod_base = OTHER; note = 2'-O-methyl-adenosine-3'-phosphate
  modified_base 12: mod_base = OTHER; note = 2'-O-methyl-uridine-3'-phosphate
  modified_base 13: mod_base = OTHER; note = 2'-O-methyl-guanosine-3'-phosphate
  modified_base 14: mod_base = OTHER; note = 2'-deoxy-2'-fluoro-adenosine-3'-phosphate
  modified_base 15: mod_base = OTHER; note = 2'-O-methyl-uridine-3'-phosphate
  modified_base 16: mod_base = OTHER; note = 2'-deoxy-2'-fluoro-adenosine-3'-phosphate
  modified_base 17: mod_base = OTHER; note = 2'-O-methyl-cytidine-3'-phosphate
  modified_base 18: mod_base = OTHER; note = 2'-O-methyl-cytidine-3'-phosphate
  modified_base 19: mod_base = OTHER; note = 2'-O-methyl-adenosine-3'-phosphorothioate
  modified_base 20: mod_base = OTHER; note = 2'-O-methyl-uridine-3'-phosphorothioate
  modified_base 21: mod_base = OTHER; note = 2'-O-methyl-uridine-3'-phosphate
tactttctccatgataccatt

SEQ ID NO: 2263 - RNA, 21 nt, synthetic construct
  source 1..21: mol_type = other RNA
  modified_base 1: mod_base = OTHER; note = 2'-O-methyl-uridine-3'-phosphorothioate
  modified_base 2: mod_base = OTHER; note = 2'-deoxy-2'-fluoro-guanosine-3'-phosphorothioate
  modified_base 3: mod_base = OTHER; note = 2'-O-methyl-adenosine-3'-phosphate
  modified_base 4: mod_base = OTHER; note = 2'-O-methyl-cytidine-3'-phosphate
  modified_base 5: mod_base = OTHER; note = 2'-O-methyl-uridine-3'-phosphate
  modified_base 6: mod_base = OTHER; note = 2'-deoxy-2'-fluoro-uridine-3'-phosphate
  modified_base 7: mod_base = OTHER; note = 2'-O-methyl-uridine-3'-phosphate
  modified_base 8: mod_base = OTHER; note = 2'-deoxy-2'-fluoro-cytidine-3'-phosphate
  modified_base 9: mod_base = OTHER; note = 2'-deoxy-2'-fluoro-uridine-3'-phosphate
  modified_base 10: mod_base = OTHER; note = 2'-O-methyl-cytidine-3'-phosphate
  modified_base 11: mod_base = OTHER; note = 2'-O-methyl-cytidine-3'-phosphate
  modified_base 12: mod_base = OTHER; note = 2'-O-methyl-adenosine-3'-phosphate
  modified_base 13: mod_base = OTHER; note = 2'-O-methyl-uridine-3'-phosphate
  modified_base 14: mod_base = OTHER; note = 2'-deoxy-2'-fluoro-guanosine-3'-phosphate
  modified_base 15: mod_base = OTHER; note = 2'-O-methyl-adenosine-3'-phosphate
  modified_base 16: mod_base = OTHER; note = 2'-deoxy-2'-fluoro-uridine-3'-phosphate
  modified_base 17: mod_base = OTHER; note = 2'-O-methyl-adenosine-3'-phosphate
  modified_base 18: mod_base = OTHER; note = 2'-O-methyl-cytidine-3'-phosphate
  modified_base 19: mod_base = OTHER; note = 2'-O-methyl-cytidine-3'-phosphorothioate
  modified_base 20: mod_base = OTHER; note = 2'-O-methyl-uridine-3'-phosphorothioate
  modified_base 21: mod_base = OTHER; note = 2'-O-methyl-uridine-3'-phosphate
tgactttctccatgatacctt

SEQ ID NO: 2264 - RNA, 21 nt, synthetic construct
  source 1..21: mol_type = other RNA
  modified_base 1: mod_base = OTHER; note = 2'-O-methyl-uridine-3'-phosphorothioate
  modified_base 2: mod_base = OTHER; note = 2'-deoxy-2'-fluoro-adenosine-3'-phosphorothioate
  modified_base 3: mod_base = OTHER; note = 2'-O-methyl-guanosine-3'-phosphate
  modified_base 4: mod_base = OTHER; note = 2'-O-methyl-guanosine-3'-phosphate
  modified_base 5: mod_base = OTHER; note = 2'-O-methyl-uridine-3'-phosphate
  modified_base 6: mod_base = OTHER; note = 2'-deoxy-2'-fluoro-adenosine-3'-phosphate
  modified_base 7: mod_base = OTHER; note = 2'-O-methyl-uridine-3'-phosphate
  modified_base 8: mod_base = OTHER; note = 2'-deoxy-2'-fluoro-uridine-3'-phosphate
  modified_base 9: mod_base = OTHER; note = 2'-deoxy-2'-fluoro-guanosine-3'-phosphate
  modified_base 10: mod_base = OTHER; note = 2'-O-methyl-guanosine-3'-phosphate
  modified_base 11: mod_base = OTHER; note = 2'-O-methyl-adenosine-3'-phosphate
  modified_base 12: mod_base = OTHER; note = 2'-O-methyl-cytidine-3'-phosphate
  modified_base 13: mod_base = OTHER; note = 2'-O-methyl-uridine-3'-phosphate
  modified_base 14: mod_base = OTHER; note = 2'-deoxy-2'-fluoro-uridine-3'-phosphate
  modified_base 15: mod_base = OTHER; note = 2'-O-methyl-uridine-3'-phosphate
  modified_base 16: mod_base = OTHER; note = 2'-deoxy-2'-fluoro-cytidine-3'-phosphate
  modified_base 17: mod_base = OTHER; note = 2'-O-methyl-uridine-3'-phosphate
  modified_base 18: mod_base = OTHER; note = 2'-O-methyl-cytidine-3'-phosphate
  modified_base 19: mod_base = OTHER; note = 2'-O-methyl-cytidine-3'-phosphorothioate
  modified_base 20: mod_base = OTHER; note = 2'-O-methyl-uridine-3'-phosphorothioate
  modified_base 21: mod_base = OTHER; note = 2'-O-methyl-uridine-3'-phosphate
taggtattggactttctcctt

SEQ ID NO: 2265 - RNA, 21 nt, synthetic construct
  source 1..21: mol_type = other RNA
  modified_base 1: mod_base = OTHER; note = 2'-O-methyl-uridine-3'-phosphorothioate
  modified_base 2: mod_base = OTHER; note = 2'-deoxy-2'-fluoro-guanosine-3'-phosphorothioate
  modified_base 3: mod_base = OTHER; note = 2'-O-methyl-adenosine-3'-phosphate
  modified_base 4: mod_base = OTHER; note = 2'-O-methyl-guanosine-3'-phosphate
  modified_base 5: mod_base = OTHER; note = 2'-O-methyl-guanosine-3'-phosphate
  modified_base 6: mod_base = OTHER; note = 2'-deoxy-2'-fluoro-uridine-3'-phosphate
  modified_base 7: mod_base = OTHER; note = 2'-O-methyl-adenosine-3'-phosphate
  modified_base 8: mod_base = OTHER; note = 2'-deoxy-2'-fluoro-uridine-3'-phosphate
  modified_base 9: mod_base = OTHER; note = 2'-deoxy-2'-fluoro-uridine-3'-phosphate
  modified_base 10: mod_base = OTHER; note = 2'-O-methyl-guanosine-3'-phosphate
  modified_base 11: mod_base = OTHER; note = 2'-O-methyl-guanosine-3'-phosphate
  modified_base 12: mod_base = OTHER; note = 2'-O-methyl-adenosine-3'-phosphate
  modified_base 13: mod_base = OTHER; note = 2'-O-methyl-cytidine-3'-phosphate
  modified_base 14: mod_base = OTHER; note = 2'-deoxy-2'-fluoro-uridine-3'-phosphate
  modified_base 15: mod_base = OTHER; note = 2'-O-methyl-uridine-3'-phosphate
  modified_base 16: mod_base = OTHER; note = 2'-deoxy-2'-fluoro-uridine-3'-phosphate
  modified_base 17: mod_base = OTHER; note = 2'-O-methyl-cytidine-3'-phosphate
  modified_base 18: mod_base = OTHER; note = 2'-O-methyl-uridine-3'-phosphate
  modified_base 19: mod_base = OTHER; note = 2'-O-methyl-cytidine-3'-phosphorothioate
  modified_base 20: mod_base = OTHER; note = 2'-O-methyl-uridine-3'-phosphorothioate
  modified_base 21: mod_base = OTHER; note = 2'-O-methyl-uridine-3'-phosphate
tgaggtattggactttctctt

SEQ ID NO: 2266 - RNA, 21 nt, synthetic construct
  source 1..21: mol_type = other RNA
  modified_base 1: mod_base = OTHER; note = 2'-O-methyl-uridine-3'-phosphorothioate
  modified_base 2: mod_base = OTHER; note = 2'-deoxy-2'-fluoro-guanosine-3'-phosphorothioate
  modified_base 3: mod_base = OTHER; note = 2'-O-methyl-uridine-3'-phosphate
  modified_base 4: mod_base = OTHER; note = 2'-O-methyl-guanosine-3'-phosphate
  modified_base 5: mod_base = OTHER; note = 2'-O-methyl-adenosine-3'-phosphate
  modified_base 6: mod_base = OTHER; note = 2'-deoxy-2'-fluoro-guanosine-3'-phosphate
  modified_base 7: mod_base = OTHER; note = 2'-O-methyl-guanosine-3'-phosphate
  modified_base 8: mod_base = OTHER; note = 2'-deoxy-2'-fluoro-uridine-3'-phosphate
  modified_base 9: mod_base = OTHER; note = 2'-deoxy-2'-fluoro-adenosine-3'-phosphate
  modified_base 10: mod_base = OTHER; note = 2'-O-methyl-uridine-3'-phosphate
  modified_base 11: mod_base = OTHER; note = 2'-O-methyl-uridine-3'-phosphate
  modified_base 12: mod_base = OTHER; note = 2'-O-methyl-guanosine-3'-phosphate
  modified_base 13: mod_base = OTHER; note = 2'-O-methyl-guanosine-3'-phosphate
  modified_base 14: mod_base = OTHER; note = 2'-deoxy-2'-fluoro-adenosine-3'-phosphate
  modified_base 15: mod_base = OTHER; note = 2'-O-methyl-cytidine-3'-phosphate
  modified_base 16: mod_base = OTHER; note = 2'-deoxy-2'-fluoro-uridine-3'-phosphate
  modified_base 17: mod_base = OTHER; note = 2'-O-methyl-uridine-3'-phosphate
  modified_base 18: mod_base = OTHER; note = 2'-O-methyl-uridine-3'-phosphate
  modified_base 19: mod_base = OTHER; note = 2'-O-methyl-cytidine-3'-phosphorothioate
  modified_base 20: mod_base = OTHER; note = 2'-O-methyl-uridine-3'-phosphorothioate
  modified_base 21: mod_base = OTHER; note = 2'-O-methyl-uridine-3'-phosphate
tgtgaggtattggactttctt

SEQ ID NO: 2267 - RNA, 21 nt, synthetic construct
  source 1..21: mol_type = other RNA
  modified_base 1: mod_base = OTHER; note = 2'-O-methyl-uridine-3'-phosphorothioate
  modified_base 2: mod_base = OTHER; note = 2'-deoxy-2'-fluoro-adenosine-3'-phosphorothioate
  modified_base 3: mod_base = OTHER; note = 2'-O-methyl-guanosine-3'-phosphate
  modified_base 4: mod_base = OTHER; note = 2'-O-methyl-uridine-3'-phosphate
  modified_base 5: mod_base = OTHER; note = 2'-O-methyl-guanosine-3'-phosphate
  modified_base 6: mod_base = OTHER; note = 2'-deoxy-2'-fluoro-adenosine-3'-phosphate
  modified_base 7: mod_base = OTHER; note = 2'-O-methyl-guanosine-3'-phosphate
  modified_base 8: mod_base = OTHER; note = 2'-deoxy-2'-fluoro-guanosine-3'-phosphate
  modified_base 9: mod_base = OTHER; note = 2'-deoxy-2'-fluoro-uridine-3'-phosphate
  modified_base 10: mod_base = OTHER; note = 2'-O-methyl-adenosine-3'-phosphate
  modified_base 11: mod_base = OTHER; note = 2'-O-methyl-uridine-3'-phosphate
  modified_base 12: mod_base = OTHER; note = 2'-O-methyl-uridine-3'-phosphate
  modified_base 13: mod_base = OTHER; note = 2'-O-methyl-guanosine-3'-phosphate
  modified_base 14: mod_base = OTHER; note = 2'-deoxy-2'-fluoro-guanosine-3'-phosphate
  modified_base 15: mod_base = OTHER; note = 2'-O-methyl-adenosine-3'-phosphate
  modified_base 16: mod_base = OTHER; note = 2'-deoxy-2'-fluoro-cytidine-3'-phosphate
  modified_base 17: mod_base = OTHER; note = 2'-O-methyl-uridine-3'-phosphate
  modified_base 18: mod_base = OTHER; note = 2'-O-methyl-uridine-3'-phosphate
  modified_base 19: mod_base = OTHER; note = 2'-O-methyl-uridine-3'-phosphorothioate
  modified_base 20: mod_base = OTHER; note = 2'-O-methyl-uridine-3'-phosphorothioate
  modified_base 21: mod_base = OTHER; note = 2'-O-methyl-uridine-3'-phosphate
tagtgaggtattggacttttt

SEQ ID NO: 2268 - RNA, 21 nt, synthetic construct
  source 1..21: mol_type = other RNA
  modified_base 1: mod_base = OTHER; note = 2'-O-methyl-uridine-3'-phosphorothioate
  modified_base 2: mod_base = OTHER; note = 2'-deoxy-2'-fluoro-adenosine-3'-phosphorothioate
  modified_base 3: mod_base = OTHER; note = 2'-O-methyl-guanosine-3'-phosphate
  modified_base 4: mod_base = OTHER; note = 2'-O-methyl-cytidine-3'-phosphate
  modified_base 5: mod_base = OTHER; note = 2'-O-methyl-guanosine-3'-phosphate
  modified_base 6: mod_base = OTHER; note = 2'-deoxy-2'-fluoro-adenosine-3'-phosphate
  modified_base 7: mod_base = OTHER; note = 2'-O-methyl-guanosine-3'-phosphate
  modified_base 8: mod_base = OTHER; note = 2'-deoxy-2'-fluoro-uridine-3'-phosphate
  modified_base 9: mod_base = OTHER; note = 2'-deoxy-2'-fluoro-guanosine-3'-phosphate
  modified_base 10: mod_base = OTHER; note = 2'-O-methyl-adenosine-3'-phosphate
  modified_base 11: mod_base = OTHER; note = 2'-O-methyl-guanosine-3'-phosphate
  modified_base 12: mod_base = OTHER; note = 2'-O-methyl-guanosine-3'-phosphate
  modified_base 13: mod_base = OTHER; note = 2'-O-methyl-uridine-3'-phosphate
  modified_base 14: mod_base = OTHER; note = 2'-deoxy-2'-fluoro-adenosine-3'-phosphate
  modified_base 15: mod_base = OTHER; note = 2'-O-methyl-uridine-3'-phosphate
  modified_base 16: mod_base = OTHER; note = 2'-deoxy-2'-fluoro-uridine-3'-phosphate
  modified_base 17: mod_base = OTHER; note = 2'-O-methyl-guanosine-3'-phosphate
  modified_base 18: mod_base = OTHER; note = 2'-O-methyl-guanosine-3'-phosphate
  modified_base 19: mod_base = OTHER; note = 2'-O-methyl-adenosine-3'-phosphorothioate
  modified_base 20: mod_base = OTHER; note = 2'-O-methyl-uridine-3'-phosphorothioate
  modified_base 21: mod_base = OTHER; note = 2'-O-methyl-uridine-3'-phosphate
tagcgagtgaggtattggatt

SEQ ID NO: 2269 - RNA, 21 nt, synthetic construct
  source 1..21: mol_type = other RNA
  modified_base 1: mod_base = OTHER; note = 2'-O-methyl-uridine-3'-phosphorothioate
  modified_base 2: mod_base = OTHER; note = 2'-deoxy-2'-fluoro-adenosine-3'-phosphorothioate
  modified_base 3: mod_base = OTHER; note = 2'-O-methyl-uridine-3'-phosphate
  modified_base 4: mod_base = OTHER; note = 2'-O-methyl-adenosine-3'-phosphate
  modified_base 5: mod_base = OTHER; note = 2'-O-methyl-guanosine-3'-phosphate
  modified_base 6: mod_base = OTHER; note = 2'-deoxy-2'-fluoro-cytidine-3'-phosphate
  modified_base 7: mod_base = OTHER; note = 2'-O-methyl-uridine-3'-phosphate
  modified_base 8: mod_base = OTHER; note = 2'-deoxy-2'-fluoro-guanosine-3'-phosphate
  modified_base 9: mod_base = OTHER; note = 2'-deoxy-2'-fluoro-adenosine-3'-phosphate
  modified_base 10: mod_base = OTHER; note = 2'-O-methyl-guanosine-3'-phosphate
  modified_base 11: mod_base = OTHER; note = 2'-O-methyl-cytidine-3'-phosphate
  modified_base 12: mod_base = OTHER; note = 2'-O-methyl-guanosine-3'-phosphate
  modified_base 13: mod_base = OTHER; note = 2'-O-methyl-adenosine-3'-phosphate
  modified_base 14: mod_base = OTHER; note = 2'-deoxy-2'-fluoro-guanosine-3'-phosphate
  modified_base 15: mod_base = OTHER; note = 2'-O-methyl-uridine-3'-phosphate
  modified_base 16: mod_base = OTHER; note = 2'-deoxy-2'-fluoro-guanosine-3'-phosphate
  modified_base 17: mod_base = OTHER; note = 2'-O-methyl-adenosine-3'-phosphate
  modified_base 18: mod_base = OTHER; note = 2'-O-methyl-guanosine-3'-phosphate
  modified_base 19: mod_base = OTHER; note = 2'-O-methyl-guanosine-3'-phosphorothioate
  modified_base 20: mod_base = OTHER; note = 2'-O-methyl-uridine-3'-phosphorothioate
  modified_base 21: mod_base = OTHER; note = 2'-O-methyl-uridine-3'-phosphate
tatagctgagcgagtgaggtt

SEQ ID NO: 2270 - RNA, 21 nt, synthetic construct
  source 1..21: mol_type = other RNA
  modified_base 1: mod_base = OTHER; note = 2'-O-methyl-uridine-3'-phosphorothioate
  modified_base 2: mod_base = OTHER; note = 2'-deoxy-2'-fluoro-uridine-3'-phosphorothioate
  modified_base 3: mod_base = OTHER; note = 2'-O-methyl-adenosine-3'-phosphate
  modified_base 4: mod_base = OTHER; note = 2'-O-methyl-uridine-3'-phosphate
  modified_base 5: mod_base = OTHER; note = 2'-O-methyl-adenosine-3'-phosphate
  modified_base 6: mod_base = OTHER; note = 2'-deoxy-2'-fluoro-guanosine-3'-phosphate
  modified_base 7: mod_base = OTHER; note = 2'-O-methyl-cytidine-3'-phosphate
  modified_base 8: mod_base = OTHER; note = 2'-deoxy-2'-fluoro-uridine-3'-phosphate
  modified_base 9: mod_base = OTHER; note = 2'-deoxy-2'-fluoro-guanosine-3'-phosphate
  modified_base 10: mod_base = OTHER; note = 2'-O-methyl-adenosine-3'-phosphate
  modified_base 11: mod_base = OTHER; note = 2'-O-methyl-guanosine-3'-phosphate
  modified_base 12: mod_base = OTHER; note = 2'-O-methyl-cytidine-3'-phosphate
  modified_base 13: mod_base = OTHER; note = 2'-O-methyl-guanosine-3'-phosphate
  modified_base 14: mod_base = OTHER; note = 2'-deoxy-2'-fluoro-adenosine-3'-phosphate
  modified_base 15: mod_base = OTHER; note = 2'-O-methyl-guanosine-3'-phosphate
  modified_base 16: mod_base = OTHER; note = 2'-deoxy-2'-fluoro-uridine-3'-phosphate
  modified_base 17: mod_base = OTHER; note = 2'-O-methyl-guanosine-3'-phosphate
  modified_base 18: mod_base = OTHER; note = 2'-O-methyl-adenosine-3'-phosphate
  modified_base 19: mod_base = OTHER; note = 2'-O-methyl-guanosine-3'-phosphorothioate
  modified_base 20: mod_base = OTHER; note = 2'-O-methyl-uridine-3'-phosphorothioate
  modified_base 21: mod_base = OTHER; note = 2'-O-methyl-uridine-3'-phosphate
ttatagctgagcgagtgagtt

SEQ ID NO: 2271 - RNA, 21 nt, synthetic construct
  source 1..21: mol_type = other RNA
  modified_base 1: mod_base = OTHER; note = 2'-O-methyl-uridine-3'-phosphorothioate
  modified_base 2: mod_base = OTHER; note = 2'-deoxy-2'-fluoro-uridine-3'-phosphorothioate
  modified_base 3: mod_base = OTHER; note = 2'-O-methyl-uridine-3'-phosphate
  modified_base 4: mod_base = OTHER; note = 2'-O-methyl-adenosine-3'-phosphate
  modified_base 5: mod_base = OTHER; note = 2'-O-methyl-uridine-3'-phosphate
  modified_base 6: mod_base = OTHER; note = 2'-deoxy-2'-fluoro-adenosine-3'-phosphate
  modified_base 7: mod_base = OTHER; note = 2'-O-methyl-guanosine-3'-phosphate
  modified_base 8: mod_base = OTHER; note = 2'-deoxy-2'-fluoro-cytidine-3'-phosphate
  modified_base 9: mod_base = OTHER; note = 2'-deoxy-2'-fluoro-uridine-3'-phosphate
  modified_base 10: mod_base = OTHER; note = 2'-O-methyl-guanosine-3'-phosphate
  modified_base 11: mod_base = OTHER; note = 2'-O-methyl-adenosine-3'-phosphate
  modified_base 12: mod_base = OTHER; note = 2'-O-methyl-guanosine-3'-phosphate
  modified_base 13: mod_base = OTHER; note = 2'-O-methyl-cytidine-3'-phosphate
  modified_base 14: mod_base = OTHER; note = 2'-deoxy-2'-fluoro-guanosine-3'-phosphate
  modified_base 15: mod_base = OTHER; note = 2'-O-methyl-adenosine-3'-phosphate
  modified_base 16: mod_base = OTHER; note = 2'-deoxy-2'-fluoro-guanosine-3'-phosphate
  modified_base 17: mod_base = OTHER; note = 2'-O-methyl-uridine-3'-phosphate
  modified_base 18: mod_base = OTHER; note = 2'-O-methyl-guanosine-3'-phosphate
  modified_base 19: mod_base = OTHER; note = 2'-O-methyl-adenosine-3'-phosphorothioate
  modified_base 20: mod_base = OTHER; note = 2'-O-methyl-uridine-3'-phosphorothioate
  modified_base 21: mod_base = OTHER; note = 2'-O-methyl-uridine-3'-phosphate
tttatagctgagcgagtgatt

SEQ ID NO: 2272 - RNA, 21 nt, synthetic construct
  source 1..21: mol_type = other RNA
  modified_base 1: mod_base = OTHER; note = 2'-O-methyl-uridine-3'-phosphorothioate
  modified_base 2: mod_base = OTHER; note = 2'-deoxy-2'-fluoro-cytidine-3'-phosphorothioate
  modified_base 3: mod_base = OTHER; note = 2'-O-methyl-uridine-3'-phosphate
  modified_base 4: mod_base = OTHER; note = 2'-O-methyl-uridine-3'-phosphate
  modified_base 5: mod_base = OTHER; note = 2'-O-methyl-adenosine-3'-phosphate
  modified_base 6: mod_base = OTHER; note = 2'-deoxy-2'-fluoro-uridine-3'-phosphate
  modified_base 7: mod_base = OTHER; note = 2'-O-methyl-adenosine-3'-phosphate
  modified_base 8: mod_base = OTHER; note = 2'-deoxy-2'-fluoro-guanosine-3'-phosphate
  modified_base 9: mod_base = OTHER; note = 2'-deoxy-2'-fluoro-cytidine-3'-phosphate
  modified_base 10: mod_base = OTHER; note = 2'-O-methyl-uridine-3'-phosphate
  modified_base 11: mod_base = OTHER; note = 2'-O-methyl-guanosine-3'-phosphate
  modified_base 12: mod_base = OTHER; note = 2'-O-methyl-adenosine-3'-phosphate
  modified_base 13: mod_base = OTHER; note = 2'-O-methyl-guanosine-3'-phosphate
  modified_base 14: mod_base = OTHER; note = 2'-deoxy-2'-fluoro-cytidine-3'-phosphate
  modified_base 15: mod_base = OTHER; note = 2'-O-methyl-guanosine-3'-phosphate
  modified_base 16: mod_base = OTHER; note = 2'-deoxy-2'-fluoro-adenosine-3'-phosphate
  modified_base 17: mod_base = OTHER; note = 2'-O-methyl-guanosine-3'-phosphate
  modified_base 18: mod_base = OTHER; note = 2'-O-methyl-uridine-3'-phosphate
  modified_base 19: mod_base = OTHER; note = 2'-O-methyl-guanosine-3'-phosphorothioate
  modified_base 20: mod_base = OTHER; note = 2'-O-methyl-uridine-3'-phosphorothioate
  modified_base 21: mod_base = OTHER; note = 2'-O-methyl-uridine-3'-phosphate
tcttatagctgagcgagtgtt

SEQ ID NO: 2273 - RNA, 21 nt, synthetic construct
  source 1..21: mol_type = other RNA
  modified_base 1: mod_base = OTHER; note = 2'-O-methyl-uridine-3'-phosphorothioate
  modified_base 2: mod_base = OTHER; note = 2'-deoxy-2'-fluoro-uridine-3'-phosphorothioate
  modified_base 3: mod_base = OTHER; note = 2'-O-methyl-uridine-3'-phosphate
  modified_base 4: mod_base = OTHER; note = 2'-O-methyl-cytidine-3'-phosphate
  modified_base 5: mod_base = OTHER; note = 2'-O-methyl-uridine-3'-phosphate
  modified_base 6: mod_base = OTHER; note = 2'-deoxy-2'-fluoro-uridine-3'-phosphate
  modified_base 7: mod_base = OTHER; note = 2'-O-methyl-adenosine-3'-phosphate
  modified_base 8: mod_base = OTHER; note = 2'-deoxy-2'-fluoro-uridine-3'-phosphate
  modified_base 9: mod_base = OTHER; note = 2'-deoxy-2'-fluoro-adenosine-3'-phosphate
  modified_base 10: mod_base = OTHER; note = 2'-O-methyl-guanosine-3'-phosphate
  modified_base 11: mod_base = OTHER; note = 2'-O-methyl-cytidine-3'-phosphate
  modified_base 12: mod_base = OTHER; note = 2'-O-methyl-uridine-3'-phosphate
  modified_base 13: mod_base = OTHER; note = 2'-O-methyl-guanosine-3'-phosphate
  modified_base 14: mod_base = OTHER; note = 2'-deoxy-2'-fluoro-adenosine-3'-phosphate
  modified_base 15: mod_base = OTHER; note = 2'-O-methyl-guanosine-3'-phosphate
  modified_base 16: mod_base = OTHER; note = 2'-deoxy-2'-fluoro-cytidine-3'-phosphate
  modified_base 17: mod_base = OTHER; note = 2'-O-methyl-guanosine-3'-phosphate
  modified_base 18: mod_base = OTHER; note = 2'-O-methyl-adenosine-3'-phosphate
  modified_base 19: mod_base = OTHER; note = 2'-O-methyl-guanosine-3'-phosphorothioate
  modified_base 20: mod_base = OTHER; note = 2'-O-methyl-uridine-3'-phosphorothioate
  modified_base 21: mod_base = OTHER; note = 2'-O-methyl-uridine-3'-phosphate
tttcttatagctgagcgagtt

SEQ ID NO: 2274 - RNA, 21 nt, synthetic construct
  source 1..21: mol_type = other RNA
  modified_base 1: mod_base = OTHER; note = 2'-O-methyl-uridine-3'-phosphorothioate
  modified_base 2: mod_base = OTHER; note = 2'-deoxy-2'-fluoro-guanosine-3'-phosphorothioate
  modified_base 3: mod_base = OTHER; note = 2'-O-methyl-cytidine-3'-phosphate
  modified_base 4: mod_base = OTHER; note = 2'-O-methyl-uridine-3'-phosphate
  modified_base 5: mod_base = OTHER; note = 2'-O-methyl-cytidine-3'-phosphate
  modified_base 6: mod_base = OTHER; note = 2'-deoxy-2'-fluoro-uridine-3'-phosphate
  modified_base 7: mod_base = OTHER; note = 2'-O-methyl-uridine-3'-phosphate
  modified_base 8: mod_base = OTHER; note = 2'-deoxy-2'-fluoro-cytidine-3'-phosphate
  modified_base 9: mod_base = OTHER; note = 2'-deoxy-2'-fluoro-uridine-3'-phosphate
  modified_base 10: mod_base = OTHER; note = 2'-O-methyl-uridine-3'-phosphate
  modified_base 11: mod_base = OTHER; note = 2'-O-methyl-adenosine-3'-phosphate
  modified_base 12: mod_base = OTHER; note = 2'-O-methyl-uridine-3'-phosphate
  modified_base 13: mod_base = OTHER; note = 2'-O-methyl-adenosine-3'-phosphate
  modified_base 14: mod_base = OTHER; note = 2'-deoxy-2'-fluoro-guanosine-3'-phosphate
  modified_base 15: mod_base = OTHER; note = 2'-O-methyl-cytidine-3'-phosphate
  modified_base 16: mod_base = OTHER; note = 2'-deoxy-2'-fluoro-uridine-3'-phosphate
  modified_base 17: mod_base = OTHER; note = 2'-O-methyl-guanosine-3'-phosphate
  modified_base 18: mod_base = OTHER; note = 2'-O-methyl-adenosine-3'-phosphate
  modified_base 19: mod_base = OTHER; note = 2'-O-methyl-guanosine-3'-phosphorothioate
  modified_base 20: mod_base = OTHER; note = 2'-O-methyl-uridine-3'-phosphorothioate
  modified_base 21: mod_base = OTHER; note = 2'-O-methyl-uridine-3'-phosphate
tgctcttcttatagctgagtt

SEQ ID NO: 2275 - RNA, 21 nt, synthetic construct
  source 1..21: mol_type = other RNA
  modified_base 1: mod_base = OTHER; note = 2'-O-methyl-uridine-3'-phosphorothioate
  modified_base 2: mod_base = OTHER; note = 2'-deoxy-2'-fluoro-guanosine-3'-phosphorothioate
  modified_base 3: mod_base = OTHER; note = 2'-O-methyl-guanosine-3'-phosphate
  modified_base 4: mod_base = OTHER; note = 2'-O-methyl-cytidine-3'-phosphate
  modified_base 5: mod_base = OTHER; note = 2'-O-methyl-uridine-3'-phosphate
  modified_base 6: mod_base = OTHER; note = 2'-deoxy-2'-fluoro-cytidine-3'-phosphate
  modified_base 7: mod_base = OTHER; note = 2'-O-methyl-uridine-3'-phosphate
  modified_base 8: mod_base = OTHER; note = 2'-deoxy-2'-fluoro-uridine-3'-phosphate
  modified_base 9: mod_base = OTHER; note = 2'-deoxy-2'-fluoro-cytidine-3'-phosphate
  modified_base 10: mod_base = OTHER; note = 2'-O-methyl-uridine-3'-phosphate
  modified_base 11: mod_base = OTHER; note = 2'-O-methyl-uridine-3'-phosphate
  modified_base 12: mod_base = OTHER; note = 2'-O-methyl-adenosine-3'-phosphate
  modified_base 13: mod_base = OTHER; note = 2'-O-methyl-uridine-3'-phosphate
  modified_base 14: mod_base = OTHER; note = 2'-deoxy-2'-fluoro-adenosine-3'-phosphate
  modified_base 15: mod_base = OTHER; note = 2'-O-methyl-guanosine-3'-phosphate
  modified_base 16: mod_base = OTHER; note = 2'-deoxy-2'-fluoro-cytidine-3'-phosphate
  modified_base 17: mod_base = OTHER; note = 2'-O-methyl-uridine-3'-phosphate
  modified_base 18: mod_base = OTHER; note = 2'-O-methyl-guanosine-3'-phosphate
  modified_base 19: mod_base = OTHER; note = 2'-O-methyl-adenosine-3'-phosphorothioate
  modified_base 20: mod_base = OTHER; note = 2'-O-methyl-uridine-3'-phosphorothioate
  modified_base 21: mod_base = OTHER; note = 2'-O-methyl-uridine-3'-phosphate
tggctcttcttatagctgatt

SEQ ID NO: 2276 - RNA, 21 nt, synthetic construct
  source 1..21: mol_type = other RNA
  modified_base 1: mod_base = OTHER; note = 2'-O-methyl-uridine-3'-phosphorothioate
  modified_base 2: mod_base = OTHER; note = 2'-deoxy-2'-fluoro-guanosine-3'-phosphorothioate
  modified_base 3: mod_base = OTHER; note = 2'-O-methyl-adenosine-3'-phosphate
  modified_base 4: mod_base = OTHER; note = 2'-O-methyl-guanosine-3'-phosphate
  modified_base 5: mod_base = OTHER; note = 2'-O-methyl-guanosine-3'-phosphate
  modified_base 6: mod_base = OTHER; note = 2'-deoxy-2'-fluoro-cytidine-3'-phosphate
  modified_base 7: mod_base = OTHER; note = 2'-O-methyl-uridine-3'-phosphate
  modified_base 8: mod_base = OTHER; note = 2'-deoxy-2'-fluoro-cytidine-3'-phosphate
  modified_base 9: mod_base = OTHER; note = 2'-deoxy-2'-fluoro-uridine-3'-phosphate
  modified_base 10: mod_base = OTHER; note = 2'-O-methyl-uridine-3'-phosphate
  modified_base 11: mod_base = OTHER; note = 2'-O-methyl-cytidine-3'-phosphate
  modified_base 12: mod_base = OTHER; note = 2'-O-methyl-uridine-3'-phosphate
  modified_base 13: mod_base = OTHER; note = 2'-O-methyl-uridine-3'-phosphate
  modified_base 14: mod_base = OTHER; note = 2'-deoxy-2'-fluoro-adenosine-3'-phosphate
  modified_base 15: mod_base = OTHER; note = 2'-O-methyl-uridine-3'-phosphate
  modified_base 16: mod_base = OTHER; note = 2'-deoxy-2'-fluoro-adenosine-3'-phosphate
  modified_base 17: mod_base = OTHER; note = 2'-O-methyl-guanosine-3'-phosphate
  modified_base 18: mod_base = OTHER; note = 2'-O-methyl-cytidine-3'-phosphate
  modified_base 19: mod_base = OTHER; note = 2'-O-methyl-uridine-3'-phosphorothioate
  modified_base 20: mod_base = OTHER; note = 2'-O-methyl-uridine-3'-phosphorothioate
  modified_base 21: mod_base = OTHER; note = 2'-O-methyl-uridine-3'-phosphate
tgaggctcttcttatagcttt

SEQ ID NO: 2277 - RNA, 21 nt, synthetic construct
  source 1..21: mol_type = other RNA
  modified_base 1: mod_base = OTHER; note = 2'-O-methyl-uridine-3'-phosphorothioate
  modified_base 2: mod_base = OTHER; note = 2'-deoxy-2'-fluoro-uridine-3'-phosphorothioate
  modified_base 3: mod_base = OTHER; note = 2'-O-methyl-guanosine-3'-phosphate
  modified_base 4: mod_base = OTHER; note = 2'-O-methyl-guanosine-3'-phosphate
  modified_base 5: mod_base = OTHER; note = 2'-O-methyl-uridine-3'-phosphate
  modified_base 6: mod_base = OTHER; note = 2'-deoxy-2'-fluoro-uridine-3'-phosphate
  modified_base 7: mod_base = OTHER; note = 2'-O-methyl-guanosine-3'-phosphate
  modified_base 8: mod_base = OTHER; note = 2'-deoxy-2'-fluoro-adenosine-3'-phosphate
  modified_base 9: mod_base = OTHER; note = 2'-deoxy-2'-fluoro-guanosine-3'-phosphate
  modified_base 10: mod_base = OTHER; note = 2'-O-methyl-guanosine-3'-phosphate
  modified_base 11: mod_base = OTHER; note = 2'-O-methyl-cytidine-3'-phosphate
  modified_base 12: mod_base = OTHER; note = 2'-O-methyl-uridine-3'-phosphate
  modified_base 13: mod_base = OTHER; note = 2'-O-methyl-cytidine-3'-phosphate
  modified_base 14: mod_base = OTHER; note = 2'-deoxy-2'-fluoro-uridine-3'-phosphate
  modified_base 15: mod_base = OTHER; note = 2'-O-methyl-uridine-3'-phosphate
  modified_base 16: mod_base = OTHER; note = 2'-deoxy-2'-fluoro-cytidine-3'-phosphate
  modified_base 17: mod_base = OTHER; note = 2'-O-methyl-uridine-3'-phosphate
  modified_base 18: mod_base = OTHER; note = 2'-O-methyl-uridine-3'-phosphate
  modified_base 19: mod_base = OTHER; note = 2'-O-methyl-adenosine-3'-phosphorothioate
  modified_base 20: mod_base = OTHER; note = 2'-O-methyl-uridine-3'-phosphorothioate
  modified_base 21: mod_base = OTHER; note = 2'-O-methyl-uridine-3'-phosphate
ttggttgaggctcttcttatt

SEQ ID NO: 2278 - RNA, 21 nt, synthetic construct
  source 1..21: mol_type = other RNA
  modified_base 1: mod_base = OTHER; note = 2'-O-methyl-uridine-3'-phosphorothioate
  modified_base 2: mod_base = OTHER; note = 2'-deoxy-2'-fluoro-uridine-3'-phosphorothioate
  modified_base 3: mod_base = OTHER; note = 2'-O-methyl-guanosine-3'-phosphate
  modified_base 4: mod_base = OTHER; note = 2'-O-methyl-adenosine-3'-phosphate
  modified_base 5: mod_base = OTHER; note = 2'-O-methyl-cytidine-3'-phosphate
  modified_base 6: mod_base = OTHER; note = 2'-deoxy-2'-fluoro-guanosine-3'-phosphate
  modified_base 7: mod_base = OTHER; note = 2'-O-methyl-uridine-3'-phosphate
  modified_base 8: mod_base = OTHER; note = 2'-deoxy-2'-fluoro-guanosine-3'-phosphate
  modified_base 9: mod_base = OTHER; note = 2'-deoxy-2'-fluoro-cytidine-3'-phosphate
  modified_base 10: mod_base = OTHER; note = 2'-O-methyl-uridine-3'-phosphate
  modified_base 11: mod_base = OTHER; note = 2'-O-methyl-uridine-3'-phosphate
  modified_base 12: mod_base = OTHER; note = 2'-O-methyl-guanosine-3'-phosphate
  modified_base 13: mod_base = OTHER; note = 2'-O-methyl-uridine-3'-phosphate
  modified_base 14: mod_base = OTHER; note = 2'-deoxy-2'-fluoro-uridine-3'-phosphate
  modified_base 15: mod_base = OTHER; note = 2'-O-methyl-guanosine-3'-phosphate
  modified_base 16: mod_base = OTHER; note = 2'-deoxy-2'-fluoro-adenosine-3'-phosphate
  modified_base 17: mod_base = OTHER; note = 2'-O-methyl-guanosine-3'-phosphate
  modified_base 18: mod_base = OTHER; note = 2'-O-methyl-guanosine-3'-phosphate
  modified_base 19: mod_base = OTHER; note = 2'-O-methyl-cytidine-3'-phosphorothioate
  modified_base 20: mod_base = OTHER; note = 2'-O-methyl-uridine-3'-phosphorothioate
  modified_base 21: mod_base = OTHER; note = 2'-O-methyl-uridine-3'-phosphate
ttgacgtgcttgttgaggctt

SEQ ID NO: 2279 - RNA, 21 nt, synthetic construct
  source 1..21: mol_type = other RNA
  modified_base 1: mod_base = OTHER; note = 2'-O-methyl-uridine-3'-phosphorothioate
  modified_base 2: mod_base = OTHER; note = 2'-deoxy-2'-fluoro-uridine-3'-phosphorothioate
  modified_base 3: mod_base = OTHER; note = 2'-O-methyl-uridine-3'-phosphate
  modified_base 4: mod_base = OTHER; note = 2'-O-methyl-guanosine-3'-phosphate
  modified_base 5: mod_base = OTHER; note = 2'-O-methyl-adenosine-3'-phosphate
  modified_base 6: mod_base = OTHER; note = 2'-deoxy-2'-fluoro-cytidine-3'-phosphate
  modified_base 7: mod_base = OTHER; note = 2'-O-methyl-guanosine-3'-phosphate
  modified_base 8: mod_base = OTHER; note = 2'-deoxy-2'-fluoro-uridine-3'-phosphate
  modified_base 9: mod_base = OTHER; note = 2'-deoxy-2'-fluoro-guanosine-3'-phosphate
  modified_base 10: mod_base = OTHER; note = 2'-O-methyl-cytidine-3'-phosphate
  modified_base 11: mod_base = OTHER; note = 2'-O-methyl-uridine-3'-phosphate
  modified_base 12: mod_base = OTHER; note = 2'-O-methyl-uridine-3'-phosphate
  modified_base 13: mod_base = OTHER; note = 2'-O-methyl-guanosine-3'-phosphate
  modified_base 14: mod_base = OTHER; note = 2'-deoxy-2'-fluoro-uridine-3'-phosphate
  modified_base 15: mod_base = OTHER; note = 2'-O-methyl-uridine-3'-phosphate
  modified_base 16: mod_base = OTHER; note = 2'-deoxy-2'-fluoro-guanosine-3'-phosphate
  modified_base 17: mod_base = OTHER; note = 2'-O-methyl-adenosine-3'-phosphate
  modified_base 18: mod_base = OTHER; note = 2'-O-methyl-guanosine-3'-phosphate
  modified_base 19: mod_base = OTHER; note = 2'-O-methyl-guanosine-3'-phosphorothioate
  modified_base 20: mod_base = OTHER; note = 2'-O-methyl-uridine-3'-phosphorothioate
  modified_base 21: mod_base = OTHER; note = 2'-O-methyl-uridine-3'-phosphate
tttgacgtgcttgttgaggtt

SEQ ID NO: 2280 - RNA, 21 nt, synthetic construct
  source 1..21: mol_type = other RNA
  modified_base 1: mod_base = OTHER; note = 2'-O-methyl-uridine-3'-phosphorothioate
  modified_base 2: mod_base = OTHER; note = 2'-deoxy-2'-fluoro-uridine-3'-phosphorothioate
  modified_base 3: mod_base = OTHER; note = 2'-O-methyl-uridine-3'-phosphate
  modified_base 4: mod_base = OTHER; note = 2'-O-methyl-uridine-3'-phosphate
  modified_base 5: mod_base = OTHER; note = 2'-O-methyl-guanosine-3'-phosphate
  modified_base 6: mod_base = OTHER; note = 2'-deoxy-2'-fluoro-adenosine-3'-phosphate
  modified_base 7: mod_base = OTHER; note = 2'-O-methyl-cytidine-3'-phosphate
  modified_base 8: mod_base = OTHER; note = 2'-deoxy-2'-fluoro-guanosine-3'-phosphate
  modified_base 9: mod_base = OTHER; note = 2'-deoxy-2'-fluoro-uridine-3'-phosphate
  modified_base 10: mod_base = OTHER; note = 2'-O-methyl-guanosine-3'-phosphate
  modified_base 11: mod_base = OTHER; note = 2'-O-methyl-cytidine-3'-phosphate
  modified_base 12: mod_base = OTHER; note = 2'-O-methyl-uridine-3'-phosphate
  modified_base 13: mod_base = OTHER; note = 2'-O-methyl-uridine-3'-phosphate
  modified_base 14: mod_base = OTHER; note = 2'-deoxy-2'-fluoro-guanosine-3'-phosphate
  modified_base 15: mod_base = OTHER; note = 2'-O-methyl-uridine-3'-phosphate
  modified_base 16: mod_base = OTHER; note = 2'-deoxy-2'-fluoro-uridine-3'-phosphate
  modified_base 17: mod_base = OTHER; note = 2'-O-methyl-guanosine-3'-phosphate
  modified_base 18: mod_base = OTHER; note = 2'-O-methyl-adenosine-3'-phosphate
  modified_base 19: mod_base = OTHER; note = 2'-O-methyl-guanosine-3'-phosphorothioate
  modified_base 20: mod_base = OTHER; note = 2'-O-methyl-uridine-3'-phosphorothioate
  modified_base 21: mod_base = OTHER; note = 2'-O-methyl-uridine-3'-phosphate
ttttgacgtgcttgttgagtt

SEQ ID NO: 2281 - RNA, 21 nt, synthetic construct
  source 1..21: mol_type = other RNA
  modified_base 1: mod_base = OTHER; note = 2'-O-methyl-uridine-3'-phosphorothioate
  modified_base 2: mod_base = OTHER; note = 2'-deoxy-2'-fluoro-uridine-3'-phosphorothioate
  modified_base 3: mod_base = OTHER; note = 2'-O-methyl-uridine-3'-phosphate
  modified_base 4: mod_base = OTHER; note = 2'-O-methyl-uridine-3'-phosphate
  modified_base 5: mod_base = OTHER; note = 2'-O-methyl-uridine-3'-phosphate
  modified_base 6: mod_base = OTHER; note = 2'-deoxy-2'-fluoro-guanosine-3'-phosphate
  modified_base 7: mod_base = OTHER; note = 2'-O-methyl-adenosine-3'-phosphate
  modified_base 8: mod_base = OTHER; note = 2'-deoxy-2'-fluoro-cytidine-3'-phosphate
  modified_base 9: mod_base = OTHER; note = 2'-deoxy-2'-fluoro-guanosine-3'-phosphate
  modified_base 10: mod_base = OTHER; note = 2'-O-methyl-uridine-3'-phosphate
  modified_base 11: mod_base = OTHER; note = 2'-O-methyl-guanosine-3'-phosphate
  modified_base 12: mod_base = OTHER; note = 2'-O-methyl-cytidine-3'-phosphate
  modified_base 13: mod_base = OTHER; note = 2'-O-methyl-uridine-3'-phosphate
  modified_base 14: mod_base = OTHER; note = 2'-deoxy-2'-fluoro-uridine-3'-phosphate
  modified_base 15: mod_base = OTHER; note = 2'-O-methyl-guanosine-3'-phosphate
  modified_base 16: mod_base = OTHER; note = 2'-deoxy-2'-fluoro-uridine-3'-phosphate
  modified_base 17: mod_base = OTHER; note = 2'-O-methyl-uridine-3'-phosphate
  modified_base 18: mod_base = OTHER; note = 2'-O-methyl-guanosine-3'-phosphate
  modified_base 19: mod_base = OTHER; note = 2'-O-methyl-adenosine-3'-phosphorothioate
  modified_base 20: mod_base = OTHER; note = 2'-O-methyl-uridine-3'-phosphorothioate
  modified_base 21: mod_base = OTHER; note = 2'-O-methyl-uridine-3'-phosphate
tttttgacgtgcttgttgatt

SEQ ID NO: 2282 - RNA, 21 nt, synthetic construct
  source 1..21: mol_type = other RNA
  modified_base 1: mod_base = OTHER; note = 2'-O-methyl-uridine-3'-phosphorothioate
  modified_base 2: mod_base = OTHER; note = 2'-deoxy-2'-fluoro-adenosine-3'-phosphorothioate
  modified_base 3: mod_base = OTHER; note = 2'-O-methyl-uridine-3'-phosphate
  modified_base 4: mod_base = OTHER; note = 2'-O-methyl-guanosine-3'-phosphate
  modified_base 5: mod_base = OTHER; note = 2'-O-methyl-adenosine-3'-phosphate
  modified_base 6: mod_base = OTHER; note = 2'-deoxy-2'-fluoro-guanosine-3'-phosphate
  modified_base 7: mod_base = OTHER; note = 2'-O-methyl-adenosine-3'-phosphate
  modified_base 8: mod_base = OTHER; note = 2'-deoxy-2'-fluoro-cytidine-3'-phosphate
  modified_base 9: mod_base = OTHER; note = 2'-deoxy-2'-fluoro-adenosine-3'-phosphate
  modified_base 10: mod_base = OTHER; note = 2'-O-methyl-guanosine-3'-phosphate
  modified_base 11: mod_base = OTHER; note = 2'-O-methyl-adenosine-3'-phosphate
  modified_base 12: mod_base = OTHER; note = 2'-O-methyl-adenosine-3'-phosphate
  modified_base 13: mod_base = OTHER; note = 2'-O-methyl-adenosine-3'-phosphate
  modified_base 14: mod_base = OTHER; note = 2'-deoxy-2'-fluoro-uridine-3'-phosphate
  modified_base 15: mod_base = OTHER; note = 2'-O-methyl-uridine-3'-phosphate
  modified_base 16: mod_base = OTHER; note = 2'-deoxy-2'-fluoro-guanosine-3'-phosphate
  modified_base 17: mod_base = OTHER; note = 2'-O-methyl-adenosine-3'-phosphate
  modified_base 18: mod_base = OTHER; note = 2'-O-methyl-uridine-3'-phosphate
  modified_base 19: mod_base = OTHER; note = 2'-O-methyl-adenosine-3'-phosphorothioate
  modified_base 20: mod_base = OTHER; note = 2'-O-methyl-uridine-3'-phosphorothioate
  modified_base 21: mod_base = OTHER; note = 2'-O-methyl-uridine-3'-phosphate
tatgagacagaaattgatatt

SEQ ID NO: 2283 - RNA, 21 nt, synthetic construct
  source 1..21: mol_type = other RNA
  modified_base 1: mod_base = OTHER; note = 2'-O-methyl-uridine-3'-phosphorothioate
  modified_base 2: mod_base = OTHER; note = 2'-deoxy-2'-fluoro-guanosine-3'-phosphorothioate
  modified_base 3: mod_base = OTHER; note = 2'-O-methyl-adenosine-3'-phosphate
  modified_base 4: mod_base = OTHER; note = 2'-O-methyl-uridine-3'-phosphate
  modified_base 5: mod_base = OTHER; note = 2'-O-methyl-guanosine-3'-phosphate
  modified_base 6: mod_base = OTHER; note = 2'-deoxy-2'-fluoro-adenosine-3'-phosphate
  modified_base 7: mod_base = OTHER; note = 2'-O-methyl-guanosine-3'-phosphate
  modified_base 8: mod_base = OTHER; note = 2'-deoxy-2'-fluoro-adenosine-3'-phosphate
  modified_base 9: mod_base = OTHER; note = 2'-deoxy-2'-fluoro-cytidine-3'-phosphate
  modified_base 10: mod_base = OTHER; note = 2'-O-methyl-adenosine-3'-phosphate
  modified_base 11: mod_base = OTHER; note = 2'-O-methyl-guanosine-3'-phosphate
  modified_base 12: mod_base = OTHER; note = 2'-O-methyl-adenosine-3'-phosphate
  modified_base 13: mod_base = OTHER; note = 2'-O-methyl-adenosine-3'-phosphate
  modified_base 14: mod_base = OTHER; note = 2'-deoxy-2'-fluoro-adenosine-3'-phosphate
  modified_base 15: mod_base = OTHER; note = 2'-O-methyl-uridine-3'-phosphate
  modified_base 16: mod_base = OTHER; note = 2'-deoxy-2'-fluoro-uridine-3'-phosphate
  modified_base 17: mod_base = OTHER; note = 2'-O-methyl-guanosine-3'-phosphate
  modified_base 18: mod_base = OTHER; note = 2'-O-methyl-adenosine-3'-phosphate
  modified_base 19: mod_base = OTHER; note = 2'-O-methyl-uridine-3'-phosphorothioate
  modified_base 20: mod_base = OTHER; note = 2'-O-methyl-uridine-3'-phosphorothioate
  modified_base 21: mod_base = OTHER; note = 2'-O-methyl-uridine-3'-phosphate
tgatgagacagaaattgattt

SEQ ID NO: 2284 - RNA, 21 nt, synthetic construct
  source 1..21: mol_type = other RNA
  modified_base 1: mod_base = OTHER; note = 2'-O-methyl-uridine-3'-phosphorothioate
  modified_base 2: mod_base = OTHER; note = 2'-deoxy-2'-fluoro-adenosine-3'-phosphorothioate
  modified_base 3: mod_base = OTHER; note = 2'-O-methyl-guanosine-3'-phosphate
  modified_base 4: mod_base = OTHER; note = 2'-O-methyl-adenosine-3'-phosphate
  modified_base 5: mod_base = OTHER; note = 2'-O-methyl-uridine-3'-phosphate
  modified_base 6: mod_base = OTHER; note = 2'-deoxy-2'-fluoro-guanosine-3'-phosphate
  modified_base 7: mod_base = OTHER; note = 2'-O-methyl-adenosine-3'-phosphate
  modified_base 8: mod_base = OTHER; note = 2'-deoxy-2'-fluoro-guanosine-3'-phosphate
  modified_base 9: mod_base = OTHER; note = 2'-deoxy-2'-fluoro-adenosine-3'-phosphate
  modified_base 10: mod_base = OTHER; note = 2'-O-methyl-cytidine-3'-phosphate
  modified_base 11: mod_base = OTHER; note = 2'-O-methyl-adenosine-3'-phosphate
  modified_base 12: mod_base = OTHER; note = 2'-O-methyl-guanosine-3'-phosphate
  modified_base 13: mod_base = OTHER; note = 2'-O-methyl-adenosine-3'-phosphate
  modified_base 14: mod_base = OTHER; note = 2'-deoxy-2'-fluoro-adenosine-3'-phosphate
  modified_base 15: mod_base = OTHER; note = 2'-O-methyl-adenosine-3'-phosphate
  modified_base 16: mod_base = OTHER; note = 2'-deoxy-2'-fluoro-uridine-3'-phosphate
  modified_base 17: mod_base = OTHER; note = 2'-O-methyl-uridine-3'-phosphate
  modified_base 18: mod_base = OTHER; note = 2'-O-methyl-guanosine-3'-phosphate
  modified_base 19: mod_base = OTHER; note = 2'-O-methyl-adenosine-3'-phosphorothioate
  modified_base 20: mod_base = OTHER; note = 2'-O-methyl-uridine-3'-phosphorothioate
  modified_base 21: mod_base = OTHER; note = 2'-O-methyl-uridine-3'-phosphate
tagatgagacagaaattgatt

SEQ ID NO: 2285 - RNA, 21 nt, synthetic construct
  source 1..21: mol_type = other RNA
  modified_base 1: mod_base = OTHER; note = 2'-O-methyl-uridine-3'-phosphorothioate
  modified_base 2: mod_base = OTHER; note = 2'-deoxy-2'-fluoro-adenosine-3'-phosphorothioate
  modified_base 3: mod_base = OTHER; note = 2'-O-methyl-adenosine-3'-phosphate
  modified_base 4: mod_base = OTHER; note = 2'-O-methyl-guanosine-3'-phosphate
  modified_base 5: mod_base = OTHER; note = 2'-O-methyl-adenosine-3'-phosphate
  modified_base 6: mod_base = OTHER; note = 2'-deoxy-2'-fluoro-uridine-3'-phosphate
  modified_base 7: mod_base = OTHER; note = 2'-O-methyl-guanosine-3'-phosphate
  modified_base 8: mod_base = OTHER; note = 2'-deoxy-2'-fluoro-adenosine-3'-phosphate
  modified_base 9: mod_base = OTHER; note = 2'-deoxy-2'-fluoro-guanosine-3'-phosphate
  modified_base 10: mod_base = OTHER; note = 2'-O-methyl-adenosine-3'-phosphate
  modified_base 11: mod_base = OTHER; note = 2'-O-methyl-cytidine-3'-phosphate
  modified_base 12: mod_base = OTHER; note = 2'-O-methyl-adenosine-3'-phosphate
  modified_base 13: mod_base = OTHER; note = 2'-O-methyl-guanosine-3'-phosphate
  modified_base 14: mod_base = OTHER; note = 2'-deoxy-2'-fluoro-adenosine-3'-phosphate
  modified_base 15: mod_base = OTHER; note = 2'-O-methyl-adenosine-3'-phosphate
  modified_base 16: mod_base = OTHER; note = 2'-deoxy-2'-fluoro-adenosine-3'-phosphate
  modified_base 17: mod_base = OTHER; note = 2'-O-methyl-uridine-3'-phosphate
  modified_base 18: mod_base = OTHER; note = 2'-O-methyl-uridine-3'-phosphate
  modified_base 19: mod_base = OTHER; note = 2'-O-methyl-guanosine-3'-phosphorothioate
  modified_base 20: mod_base = OTHER; note = 2'-O-methyl-uridine-3'-phosphorothioate
  modified_base 21: mod_base = OTHER; note = 2'-O-methyl-uridine-3'-phosphate
taagatgagacagaaattgtt

SEQ ID NO: 2286 - RNA, 21 nt, synthetic construct
  source 1..21: mol_type = other RNA
  modified_base 1: mod_base = OTHER; note = 2'-O-methyl-uridine-3'-phosphorothioate
  modified_base 2: mod_base = OTHER; note = 2'-deoxy-2'-fluoro-uridine-3'-phosphorothioate
  modified_base 3: mod_base = OTHER; note = 2'-O-methyl-adenosine-3'-phosphate
  modified_base 4: mod_base = OTHER; note = 2'-O-methyl-uridine-3'-phosphate
  modified_base 5: mod_base = OTHER; note = 2'-O-methyl-uridine-3'-phosphate
  modified_base 6: mod_base = OTHER; note = 2'-deoxy-2'-fluoro-adenosine-3'-phosphate
  modified_base 7: mod_base = OTHER; note = 2'-O-methyl-adenosine-3'-phosphate
  modified_base 8: mod_base = OTHER; note = 2'-deoxy-2'-fluoro-guanosine-3'-phosphate
  modified_base 9: mod_base = OTHER; note = 2'-deoxy-2'-fluoro-adenosine-3'-phosphate
  modified_base 10: mod_base = OTHER; note = 2'-O-methyl-uridine-3'-phosphate
  modified_base 11: mod_base = OTHER; note = 2'-O-methyl-guanosine-3'-phosphate
  modified_base 12: mod_base = OTHER; note = 2'-O-methyl-adenosine-3'-phosphate
  modified_base 13: mod_base = OTHER; note = 2'-O-methyl-guanosine-3'-phosphate
  modified_base 14: mod_base = OTHER; note = 2'-deoxy-2'-fluoro-adenosine-3'-phosphate
  modified_base 15: mod_base = OTHER; note = 2'-O-methyl-cytidine-3'-phosphate
  modified_base 16: mod_base = OTHER; note = 2'-deoxy-2'-fluoro-adenosine-3'-phosphate
  modified_base 17: mod_base = OTHER; note = 2'-O-methyl-guanosine-3'-phosphate
  modified_base 18: mod_base = OTHER; note = 2'-O-methyl-adenosine-3'-phosphate
  modified_base 19: mod_base = OTHER; note = 2'-O-methyl-adenosine-3'-phosphorothioate
  modified_base 20: mod_base = OTHER; note = 2'-O-methyl-uridine-3'-phosphorothioate
  modified_base 21: mod_base = OTHER; note = 2'-O-methyl-uridine-3'-phosphate
ttattaagatgagacagaatt

SEQ ID NO: 2287 - RNA, 21 nt, synthetic construct
  source 1..21: mol_type = other RNA
  modified_base 1: mod_base = OTHER; note = 2'-O-methyl-uridine-3'-phosphorothioate
  modified_base 2: mod_base = OTHER; note = 2'-deoxy-2'-fluoro-adenosine-3'-phosphorothioate
  modified_base 3: mod_base = OTHER; note = 2'-O-methyl-uridine-3'-phosphate
  modified_base 4: mod_base = OTHER; note = 2'-O-methyl-adenosine-3'-phosphate
  modified_base 5: mod_base = OTHER; note = 2'-O-methyl-uridine-3'-phosphate
  modified_base 6: mod_base = OTHER; note = 2'-deoxy-2'-fluoro-uridine-3'-phosphate
  modified_base 7: mod_base = OTHER; note = 2'-O-methyl-adenosine-3'-phosphate
  modified_base 8: mod_base = OTHER; note = 2'-deoxy-2'-fluoro-adenosine-3'-phosphate
  modified_base 9: mod_base = OTHER; note = 2'-deoxy-2'-fluoro-guanosine-3'-phosphate
  modified_base 10: mod_base = OTHER; note = 2'-O-methyl-adenosine-3'-phosphate
  modified_base 11: mod_base = OTHER; note = 2'-O-methyl-uridine-3'-phosphate
  modified_base 12: mod_base = OTHER; note = 2'-O-methyl-guanosine-3'-phosphate
  modified_base 13: mod_base = OTHER; note = 2'-O-methyl-adenosine-3'-phosphate
  modified_base 14: mod_base = OTHER; note = 2'-deoxy-2'-fluoro-guanosine-3'-phosphate
  modified_base 15: mod_base = OTHER; note = 2'-O-methyl-adenosine-3'-phosphate
  modified_base 16: mod_base = OTHER; note = 2'-deoxy-2'-fluoro-cytidine-3'-phosphate
  modified_base 17: mod_base = OTHER; note = 2'-O-methyl-adenosine-3'-phosphate
  modified_base 18: mod_base = OTHER; note = 2'-O-methyl-guanosine-3'-phosphate
  modified_base 19: mod_base = OTHER; note = 2'-O-methyl-adenosine-3'-phosphorothioate
  modified_base 20: mod_base = OTHER; note = 2'-O-methyl-uridine-3'-phosphorothioate
  modified_base 21: mod_base = OTHER; note = 2'-O-methyl-uridine-3'-phosphate
tatattaagatgagacagatt

SEQ ID NO: 2288 - RNA, 21 nt, synthetic construct
  source 1..21: mol_type = other RNA
  modified_base 1: mod_base = OTHER; note = 2'-O-methyl-uridine-3'-phosphorothioate
  modified_base 2: mod_base = OTHER; note = 2'-deoxy-2'-fluoro-cytidine-3'-phosphorothioate
  modified_base 3: mod_base = OTHER; note = 2'-O-methyl-adenosine-3'-phosphate
  modified_base 4: mod_base = OTHER; note = 2'-O-methyl-uridine-3'-phosphate
  modified_base 5: mod_base = OTHER; note = 2'-O-methyl-adenosine-3'-phosphate
  modified_base 6: mod_base = OTHER; note = 2'-deoxy-2'-fluoro-uridine-3'-phosphate
  modified_base 7: mod_base = OTHER; note = 2'-O-methyl-uridine-3'-phosphate
  modified_base 8: mod_base = OTHER; note = 2'-deoxy-2'-fluoro-adenosine-3'-phosphate
  modified_base 9: mod_base = OTHER; note = 2'-deoxy-2'-fluoro-adenosine-3'-phosphate
  modified_base 10: mod_base = OTHER; note = 2'-O-methyl-guanosine-3'-phosphate
  modified_base 11: mod_base = OTHER; note = 2'-O-methyl-adenosine-3'-phosphate
  modified_base 12: mod_base = OTHER; note = 2'-O-methyl-uridine-3'-phosphate
  modified_base 13: mod_base = OTHER; note = 2'-O-methyl-guanosine-3'-phosphate
  modified_base 14: mod_base = OTHER; note = 2'-deoxy-2'-fluoro-adenosine-3'-phosphate
  modified_base 15: mod_base = OTHER; note = 2'-O-methyl-guanosine-3'-phosphate
  modified_base 16: mod_base = OTHER; note = 2'-deoxy-2'-fluoro-adenosine-3'-phosphate
  modified_base 17: mod_base = OTHER; note = 2'-O-methyl-cytidine-3'-phosphate
  modified_base 18: mod_base = OTHER; note = 2'-O-methyl-adenosine-3'-phosphate
  modified_base 19: mod_base = OTHER; note = 2'-O-methyl-guanosine-3'-phosphorothioate
  modified_base 20: mod_base = OTHER; note = 2'-O-methyl-uridine-3'-phosphorothioate
  modified_base 21: mod_base = OTHER; note = 2'-O-methyl-uridine-3'-phosphate
tcatattaagatgagacagtt

SEQ ID NO: 2289 - RNA, 21 nt, synthetic construct
  source 1..21: mol_type = other RNA
  modified_base 1: mod_base = OTHER; note = 2'-O-methyl-uridine-3'-phosphorothioate
  modified_base 2: mod_base = OTHER; note = 2'-deoxy-2'-fluoro-adenosine-3'-phosphorothioate
  modified_base 3: mod_base = OTHER; note = 2'-O-methyl-guanosine-3'-phosphate
  modified_base 4: mod_base = OTHER; note = 2'-O-methyl-adenosine-3'-phosphate
  modified_base 5: mod_base = OTHER; note = 2'-O-methyl-uridine-3'-phosphate
  modified_base 6: mod_base = OTHER; note = 2'-deoxy-2'-fluoro-cytidine-3'-phosphate
  modified_base 7: mod_base = OTHER; note = 2'-O-methyl-adenosine-3'-phosphate
  modified_base 8: mod_base = OTHER; note = 2'-deoxy-2'-fluoro-guanosine-3'-phosphate
  modified_base 9: mod_base = OTHER; note = 2'-deoxy-2'-fluoro-cytidine-3'-phosphate
  modified_base 10: mod_base = OTHER; note = 2'-O-methyl-adenosine-3'-phosphate
  modified_base 11: mod_base = OTHER; note = 2'-O-methyl-adenosine-3'-phosphate
  modified_base 12: mod_base = OTHER; note = 2'-O-methyl-guanosine-3'-phosphate
  modified_base 13: mod_base = OTHER; note = 2'-O-methyl-adenosine-3'-phosphate
  modified_base 14: mod_base = OTHER; note = 2'-deoxy-2'-fluoro-guanosine-3'-phosphate
  modified_base 15: mod_base = OTHER; note = 2'-O-methyl-adenosine-3'-phosphate
  modified_base 16: mod_base = OTHER; note = 2'-deoxy-2'-fluoro-cytidine-3'-phosphate
  modified_base 17: mod_base = OTHER; note = 2'-O-methyl-adenosine-3'-phosphate
  modified_base 18: mod_base = OTHER; note = 2'-O-methyl-uridine-3'-phosphate
  modified_base 19: mod_base = OTHER; note = 2'-O-methyl-adenosine-3'-phosphorothioate
  modified_base 20: mod_base = OTHER; note = 2'-O-methyl-uridine-3'-phosphorothioate
  modified_base 21: mod_base = OTHER; note = 2'-O-methyl-uridine-3'-phosphate
tagatcagcaagagacatatt

SEQ ID NO: 2290 - RNA, 21 nt, synthetic construct
  source 1..21: mol_type = other RNA
  modified_base 1: mod_base = OTHER; note = 2'-O-methyl-uridine-3'-phosphorothioate
  modified_base 2: mod_base = OTHER; note = 2'-deoxy-2'-fluoro-uridine-3'-phosphorothioate
  modified_base 3: mod_base = OTHER; note = 2'-O-methyl-adenosine-3'-phosphate
  modified_base 4: mod_base = OTHER; note = 2'-O-methyl-guanosine-3'-phosphate
  modified_base 5: mod_base = OTHER; note = 2'-O-methyl-cytidine-3'-phosphate
  modified_base 6: mod_base = OTHER; note = 2'-deoxy-2'-fluoro-adenosine-3'-phosphate
  modified_base 7: mod_base = OTHER; note = 2'-O-methyl-guanosine-3'-phosphate
  modified_base 8: mod_base = OTHER; note = 2'-deoxy-2'-fluoro-adenosine-3'-phosphate
  modified_base 9: mod_base = OTHER; note = 2'-deoxy-2'-fluoro-adenosine-3'-phosphate
  modified_base 10: mod_base = OTHER; note = 2'-O-methyl-cytidine-3'-phosphate
  modified_base 11: mod_base = OTHER; note = 2'-O-methyl-uridine-3'-phosphate
  modified_base 12: mod_base = OTHER; note = 2'-O-methyl-uridine-3'-phosphate
  modified_base 13: mod_base = OTHER; note = 2'-O-methyl-cytidine-3'-phosphate
  modified_base 14: mod_base = OTHER; note = 2'-deoxy-2'-fluoro-adenosine-3'-phosphate
  modified_base 15: mod_base = OTHER; note = 2'-O-methyl-guanosine-3'-phosphate
  modified_base 16: mod_base = OTHER; note = 2'-deoxy-2'-fluoro-adenosine-3'-phosphate
  modified_base 17: mod_base = OTHER; note = 2'-O-methyl-guanosine-3'-phosphate
  modified_base 18: mod_base = OTHER; note = 2'-O-methyl-adenosine-3'-phosphate
  modified_base 19: mod_base = OTHER; note = 2'-O-methyl-adenosine-3'-phosphorothioate
  modified_base 20: mod_base = OTHER; note = 2'-O-methyl-uridine-3'-phosphorothioate
  modified_base 21: mod_base = OTHER; note = 2'-O-methyl-uridine-3'-phosphate
ttagcagaacttcagagaatt

SEQ ID NO: 2291 - RNA, 21 nt, synthetic construct
  source 1..21: mol_type = other RNA
  modified_base 1: mod_base = OTHER; note = 2'-O-methyl-uridine-3'-phosphorothioate
  modified_base 2: mod_base = OTHER; note = 2'-deoxy-2'-fluoro-uridine-3'-phosphorothioate
  modified_base 3: mod_base = OTHER; note = 2'-O-methyl-guanosine-3'-phosphate
  modified_base 4: mod_base = OTHER; note = 2'-O-methyl-uridine-3'-phosphate
  modified_base 5: mod_base = OTHER; note = 2'-O-methyl-adenosine-3'-phosphate
  modified_base 6: mod_base = OTHER; note = 2'-deoxy-2'-fluoro-guanosine-3'-phosphate
  modified_base 7: mod_base = OTHER; note = 2'-O-methyl-cytidine-3'-phosphate
  modified_base 8: mod_base = OTHER; note = 2'-deoxy-2'-fluoro-adenosine-3'-phosphate
  modified_base 9: mod_base = OTHER; note = 2'-deoxy-2'-fluoro-guanosine-3'-phosphate
  modified_base 10: mod_base = OTHER; note = 2'-O-methyl-adenosine-3'-phosphate
  modified_base 11: mod_base = OTHER; note = 2'-O-methyl-adenosine-3'-phosphate
  modified_base 12: mod_base = OTHER; note = 2'-O-methyl-cytidine-3'-phosphate
  modified_base 13: mod_base = OTHER; note = 2'-O-methyl-uridine-3'-phosphate
  modified_base 14: mod_base = OTHER; note = 2'-deoxy-2'-fluoro-uridine-3'-phosphate
  modified_base 15: mod_base = OTHER; note = 2'-O-methyl-cytidine-3'-phosphate
  modified_base 16: mod_base = OTHER; note = 2'-deoxy-2'-fluoro-adenosine-3'-phosphate
  modified_base 17: mod_base = OTHER; note = 2'-O-methyl-guanosine-3'-phosphate
  modified_base 18: mod_base = OTHER; note = 2'-O-methyl-adenosine-3'-phosphate
  modified_base 19: mod_base = OTHER; note = 2'-O-methyl-guanosine-3'-phosphorothioate
  modified_base 20: mod_base = OTHER; note = 2'-O-methyl-uridine-3'-phosphorothioate
  modified_base 21: mod_base = OTHER; note = 2'-O-methyl-uridine-3'-phosphate
ttgtagcagaacttcagagtt

SEQ ID NO: 2292 - RNA, 21 nt, synthetic construct
  source 1..21: mol_type = other RNA
  modified_base 1: mod_base = OTHER; note = 2'-O-methyl-uridine-3'-phosphorothioate
  modified_base 2: mod_base = OTHER; note = 2'-deoxy-2'-fluoro-guanosine-3'-phosphorothioate
  modified_base 3: mod_base = OTHER; note = 2'-O-methyl-adenosine-3'-phosphate
  modified_base 4: mod_base = OTHER; note = 2'-O-methyl-guanosine-3'-phosphate
  modified_base 5: mod_base = OTHER; note = 2'-O-methyl-guanosine-3'-phosphate
  modified_base 6: mod_base = OTHER; note = 2'-deoxy-2'-fluoro-uridine-3'-phosphate
  modified_base 7: mod_base = OTHER; note = 2'-O-methyl-uridine-3'-phosphate
  modified_base 8: mod_base = OTHER; note = 2'-deoxy-2'-fluoro-guanosine-3'-phosphate
  modified_base 9: mod_base = OTHER; note = 2'-deoxy-2'-fluoro-uridine-3'-phosphate
  modified_base 10: mod_base = OTHER; note = 2'-O-methyl-adenosine-3'-phosphate
  modified_base 11: mod_base = OTHER; note = 2'-O-methyl-guanosine-3'-phosphate
  modified_base 12: mod_base = OTHER; note = 2'-O-methyl-cytidine-3'-phosphate
  modified_base 13: mod_base = OTHER; note = 2'-O-methyl-adenosine-3'-phosphate
  modified_base 14: mod_base = OTHER; note = 2'-deoxy-2'-fluoro-guanosine-3'-phosphate
  modified_base 15: mod_base = OTHER; note = 2'-O-methyl-adenosine-3'-phosphate
  modified_base 16: mod_base = OTHER; note = 2'-deoxy-2'-fluoro-adenosine-3'-phosphate
  modified_base 17: mod_base = OTHER; note = 2'-O-methyl-cytidine-3'-phosphate
  modified_base 18: mod_base = OTHER; note = 2'-O-methyl-uridine-3'-phosphate
  modified_base 19: mod_base = OTHER; note = 2'-O-methyl-uridine-3'-phosphorothioate
  modified_base 20: mod_base = OTHER; note = 2'-O-methyl-uridine-3'-phosphorothioate
  modified_base 21: mod_base = OTHER; note = 2'-O-methyl-uridine-3'-phosphate
tgaggttgtagcagaactttt

SEQ ID NO: 2293 - RNA, 21 nt, synthetic construct
  source 1..21: mol_type = other RNA
  modified_base 1: mod_base = OTHER; note = 2'-O-methyl-uridine-3'-phosphorothioate
  modified_base 2: mod_base = OTHER; note = 2'-deoxy-2'-fluoro-adenosine-3'-phosphorothioate
  modified_base 3: mod_base = OTHER; note = 2'-O-methyl-guanosine-3'-phosphate
  modified_base 4: mod_base = OTHER; note = 2'-O-methyl-adenosine-3'-phosphate
  modified_base 5: mod_base = OTHER; note = 2'-O-methyl-guanosine-3'-phosphate
  modified_base 6: mod_base = OTHER; note = 2'-deoxy-2'-fluoro-guanosine-3'-phosphate
  modified_base 7: mod_base = OTHER; note = 2'-O-methyl-uridine-3'-phosphate
  modified_base 8: mod_base = OTHER; note = 2'-deoxy-2'-fluoro-uridine-3'-phosphate
  modified_base 9: mod_base = OTHER; note = 2'-deoxy-2'-fluoro-guanosine-3'-phosphate
  modified_base 10: mod_base = OTHER; note = 2'-O-methyl-uridine-3'-phosphate
  modified_base 11: mod_base = OTHER; note = 2'-O-methyl-adenosine-3'-phosphate
  modified_base 12: mod_base = OTHER; note = 2'-O-methyl-guanosine-3'-phosphate
  modified_base 13: mod_base = OTHER; note = 2'-O-methyl-cytidine-3'-phosphate
  modified_base 14: mod_base = OTHER; note = 2'-deoxy-2'-fluoro-adenosine-3'-phosphate
  modified_base 15: mod_base = OTHER; note = 2'-O-methyl-guanosine-3'-phosphate
  modified_base 16: mod_base = OTHER; note = 2'-deoxy-2'-fluoro-adenosine-3'-phosphate
  modified_base 17: mod_base = OTHER; note = 2'-O-methyl-adenosine-3'-phosphate
  modified_base 18: mod_base = OTHER; note = 2'-O-methyl-cytidine-3'-phosphate
  modified_base 19: mod_base = OTHER; note = 2'-O-methyl-uridine-3'-phosphorothioate
  modified_base 20: mod_base = OTHER; note = 2'-O-methyl-uridine-3'-phosphorothioate
  modified_base 21: mod_base = OTHER; note = 2'-O-methyl-uridine-3'-phosphate
tagaggttgtagcagaacttt

SEQ ID NO: 2294 - RNA, 21 nt, synthetic construct
  source 1..21: mol_type = other RNA
  modified_base 1: mod_base = OTHER; note = 2'-O-methyl-uridine-3'-phosphorothioate
  modified_base 2: mod_base = OTHER; note = 2'-deoxy-2'-fluoro-uridine-3'-phosphorothioate
  modified_base 3: mod_base = OTHER; note = 2'-O-methyl-adenosine-3'-phosphate
  modified_base 4: mod_base = OTHER; note = 2'-O-methyl-guanosine-3'-phosphate
  modified_base 5: mod_base = OTHER; note = 2'-O-methyl-adenosine-3'-phosphate
  modified_base 6: mod_base = OTHER; note = 2'-deoxy-2'-fluoro-guanosine-3'-phosphate
  modified_base 7: mod_base = OTHER; note = 2'-O-methyl-guanosine-3'-phosphate
  modified_base 8: mod_base = OTHER; note = 2'-deoxy-2'-fluoro-uridine-3'-phosphate
  modified_base 9: mod_base = OTHER; note = 2'-deoxy-2'-fluoro-uridine-3'-phosphate
  modified_base 10: mod_base = OTHER; note = 2'-O-methyl-guanosine-3'-phosphate
  modified_base 11: mod_base = OTHER; note = 2'-O-methyl-uridine-3'-phosphate
  modified_base 12: mod_base = OTHER; note = 2'-O-methyl-adenosine-3'-phosphate
  modified_base 13: mod_base = OTHER; note = 2'-O-methyl-guanosine-3'-phosphate
  modified_base 14: mod_base = OTHER; note = 2'-deoxy-2'-fluoro-cytidine-3'-phosphate
  modified_base 15: mod_base = OTHER; note = 2'-O-methyl-adenosine-3'-phosphate
  modified_base 16: mod_base = OTHER; note = 2'-deoxy-2'-fluoro-guanosine-3'-phosphate
  modified_base 17: mod_base = OTHER; note = 2'-O-methyl-adenosine-3'-phosphate
  modified_base 18: mod_base = OTHER; note = 2'-O-methyl-adenosine-3'-phosphate
  modified_base 19: mod_base = OTHER; note = 2'-O-methyl-cytidine-3'-phosphorothioate
  modified_base 20: mod_base = OTHER; note = 2'-O-methyl-uridine-3'-phosphorothioate
  modified_base 21: mod_base = OTHER; note = 2'-O-methyl-uridine-3'-phosphate
ttagaggttgtagcagaactt

SEQ ID NO: 2295 - RNA, 21 nt, synthetic construct
  source 1..21: mol_type = other RNA
  modified_base 1: mod_base = OTHER; note = 2'-O-methyl-uridine-3'-phosphorothioate
  modified_base 2: mod_base = OTHER; note = 2'-deoxy-2'-fluoro-uridine-3'-phosphorothioate
  modified_base 3: mod_base = OTHER; note = 2'-O-methyl-cytidine-3'-phosphate
  modified_base 4: mod_base = OTHER; note = 2'-O-methyl-uridine-3'-phosphate
  modified_base 5: mod_base = OTHER; note = 2'-O-methyl-adenosine-3'-phosphate
  modified_base 6: mod_base = OTHER; note = 2'-deoxy-2'-fluoro-guanosine-3'-phosphate
  modified_base 7: mod_base = OTHER; note = 2'-O-methyl-adenosine-3'-phosphate
  modified_base 8: mod_base = OTHER; note = 2'-deoxy-2'-fluoro-guanosine-3'-phosphate
  modified_base 9: mod_base = OTHER; note = 2'-deoxy-2'-fluoro-guanosine-3'-phosphate
  modified_base 10: mod_base = OTHER; note = 2'-O-methyl-uridine-3'-phosphate
  modified_base 11: mod_base = OTHER; note = 2'-O-methyl-uridine-3'-phosphate
  modified_base 12: mod_base = OTHER; note = 2'-O-methyl-guanosine-3'-phosphate
  modified_base 13: mod_base = OTHER; note = 2'-O-methyl-uridine-3'-phosphate
  modified_base 14: mod_base = OTHER; note = 2'-deoxy-2'-fluoro-adenosine-3'-phosphate
  modified_base 15: mod_base = OTHER; note = 2'-O-methyl-guanosine-3'-phosphate
  modified_base 16: mod_base = OTHER; note = 2'-deoxy-2'-fluoro-cytidine-3'-phosphate
  modified_base 17: mod_base = OTHER; note = 2'-O-methyl-adenosine-3'-phosphate
  modified_base 18: mod_base = OTHER; note = 2'-O-methyl-guanosine-3'-phosphate
  modified_base 19: mod_base = OTHER; note = 2'-O-methyl-adenosine-3'-phosphorothioate
  modified_base 20: mod_base = OTHER; note = 2'-O-methyl-uridine-3'-phosphorothioate
  modified_base 21: mod_base = OTHER; note = 2'-O-methyl-uridine-3'-phosphate
ttctagaggttgtagcagatt

SEQ ID NO: 2296 - RNA, 21 nt, synthetic construct
  source 1..21: mol_type = other RNA
  modified_base 1: mod_base = OTHER; note = 2'-O-methyl-uridine-3'-phosphorothioate
  modified_base 2: mod_base = OTHER; note = 2'-deoxy-2'-fluoro-cytidine-3'-phosphorothioate
  modified_base 3: mod_base = OTHER; note = 2'-O-methyl-adenosine-3'-phosphate
  modified_base 4: mod_base = OTHER; note = 2'-O-methyl-guanosine-3'-phosphate
  modified_base 5: mod_base = OTHER; note = 2'-O-methyl-adenosine-3'-phosphate
  modified_base 6: mod_base = OTHER; note = 2'-deoxy-2'-fluoro-uridine-3'-phosphate
  modified_base 7: mod_base = OTHER; note = 2'-O-methyl-cytidine-3'-phosphate
  modified_base 8: mod_base = OTHER; note = 2'-deoxy-2'-fluoro-uridine-3'-phosphate
  modified_base 9: mod_base = OTHER; note = 2'-deoxy-2'-fluoro-adenosine-3'-phosphate
  modified_base 10: mod_base = OTHER; note = 2'-O-methyl-guanosine-3'-phosphate
  modified_base 11: mod_base = OTHER; note = 2'-O-methyl-adenosine-3'-phosphate
  modified_base 12: mod_base = OTHER; note = 2'-O-methyl-guanosine-3'-phosphate
  modified_base 13: mod_base = OTHER; note = 2'-O-methyl-guanosine-3'-phosphate
  modified_base 14: mod_base = OTHER; note = 2'-deoxy-2'-fluoro-uridine-3'-phosphate
  modified_base 15: mod_base = OTHER; note = 2'-O-methyl-uridine-3'-phosphate
  modified_base 16: mod_base = OTHER; note = 2'-deoxy-2'-fluoro-guanosine-3'-phosphate
  modified_base 17: mod_base = OTHER; note = 2'-O-methyl-uridine-3'-phosphate
  modified_base 18: mod_base = OTHER; note = 2'-O-methyl-adenosine-3'-phosphate
  modified_base 19: mod_base = OTHER; note = 2'-O-methyl-guanosine-3'-phosphorothioate
  modified_base 20: mod_base = OTHER; note = 2'-O-methyl-uridine-3'-phosphorothioate
  modified_base 21: mod_base = OTHER; note = 2'-O-methyl-uridine-3'-phosphate
tcagatctagaggttgtagtt

SEQ ID NO: 2297 - RNA, 21 nt, synthetic construct
  source 1..21: mol_type = other RNA
  modified_base 1: mod_base = OTHER; note = 2'-O-methyl-uridine-3'-phosphorothioate
  modified_base 2: mod_base = OTHER; note = 2'-deoxy-2'-fluoro-uridine-3'-phosphorothioate
  modified_base 3: mod_base = OTHER; note = 2'-O-methyl-guanosine-3'-phosphate
  modified_base 4: mod_base = OTHER; note = 2'-O-methyl-cytidine-3'-phosphate
  modified_base 5: mod_base = OTHER; note = 2'-O-methyl-adenosine-3'-phosphate
  modified_base 6: mod_base = OTHER; note = 2'-deoxy-2'-fluoro-guanosine-3'-phosphate
  modified_base 7: mod_base = OTHER; note = 2'-O-methyl-adenosine-3'-phosphate
  modified_base 8: mod_base = OTHER; note = 2'-deoxy-2'-fluoro-uridine-3'-phosphate
  modified_base 9: mod_base = OTHER; note = 2'-deoxy-2'-fluoro-cytidine-3'-phosphate
  modified_base 10: mod_base = OTHER; note = 2'-O-methyl-uridine-3'-phosphate
  modified_base 11: mod_base = OTHER; note = 2'-O-methyl-adenosine-3'-phosphate
  modified_base 12: mod_base = OTHER; note = 2'-O-methyl-guanosine-3'-phosphate
  modified_base 13: mod_base = OTHER; note = 2'-O-methyl-adenosine-3'-phosphate
  modified_base 14: mod_base = OTHER; note = 2'-deoxy-2'-fluoro-guanosine-3'-phosphate
  modified_base 15: mod_base = OTHER; note = 2'-O-methyl-guanosine-3'-phosphate
  modified_base 16: mod_base = OTHER; note = 2'-deoxy-2'-fluoro-uridine-3'-phosphate
  modified_base 17: mod_base = OTHER; note = 2'-O-methyl-uridine-3'-phosphate
  modified_base 18: mod_base = OTHER; note = 2'-O-methyl-guanosine-3'-phosphate
  modified_base 19: mod_base = OTHER; note = 2'-O-methyl-uridine-3'-phosphorothioate
  modified_base 20: mod_base = OTHER; note = 2'-O-methyl-uridine-3'-phosphorothioate
  modified_base 21: mod_base = OTHER; note = 2'-O-methyl-uridine-3'-phosphate
ttgcagatctagaggttgttt

SEQ ID NO: 2298 - RNA, 21 nt, synthetic construct
  source 1..21: mol_type = other RNA
  modified_base 1: mod_base = OTHER; note = 2'-O-methyl-uridine-3'-phosphorothioate
  modified_base 2: mod_base = OTHER; note = 2'-deoxy-2'-fluoro-uridine-3'-phosphorothioate
  modified_base 3: mod_base = OTHER; note = 2'-O-methyl-adenosine-3'-phosphate
  modified_base 4: mod_base = OTHER; note = 2'-O-methyl-adenosine-3'-phosphate
  modified_base 5: mod_base = OTHER; note = 2'-O-methyl-guanosine-3'-phosphate
  modified_base 6: mod_base = OTHER; note = 2'-deoxy-2'-fluoro-cytidine-3'-phosphate
  modified_base 7: mod_base = OTHER; note = 2'-O-methyl-uridine-3'-phosphate
  modified_base 8: mod_base = OTHER; note = 2'-deoxy-2'-fluoro-guanosine-3'-phosphate
  modified_base 9: mod_base = OTHER; note = 2'-deoxy-2'-fluoro-adenosine-3'-phosphate
  modified_base 10: mod_base = OTHER; note = 2'-O-methyl-uridine-3'-phosphate
  modified_base 11: mod_base = OTHER; note = 2'-O-methyl-guanosine-3'-phosphate
  modified_base 12: mod_base = OTHER; note = 2'-O-methyl-uridine-3'-phosphate
  modified_base 13: mod_base = OTHER; note = 2'-O-methyl-guanosine-3'-phosphate
  modified_base 14: mod_base = OTHER; note = 2'-deoxy-2'-fluoro-guanosine-3'-phosphate
  modified_base 15: mod_base = OTHER; note = 2'-O-methyl-cytidine-3'-phosphate
  modified_base 16: mod_base = OTHER; note = 2'-deoxy-2'-fluoro-adenosine-3'-phosphate
  modified_base 17: mod_base = OTHER; note = 2'-O-methyl-adenosine-3'-phosphate
  modified_base 18: mod_base = OTHER; note = 2'-O-methyl-guanosine-3'-phosphate
  modified_base 19: mod_base = OTHER; note = 2'-O-methyl-cytidine-3'-phosphorothioate
  modified_base 20: mod_base = OTHER; note = 2'-O-methyl-uridine-3'-phosphorothioate
  modified_base 21: mod_base = OTHER; note = 2'-O-methyl-uridine-3'-phosphate
ttaagctgatgtggcaagctt

SEQ ID NO: 2299 - RNA, 21 nt, synthetic construct
  source 1..21: mol_type = other RNA
  modified_base 1: mod_base = OTHER; note = 2'-O-methyl-uridine-3'-phosphorothioate
  modified_base 2: mod_base = OTHER; note = 2'-deoxy-2'-fluoro-uridine-3'-phosphorothioate
  modified_base 3: mod_base = OTHER; note = 2'-O-methyl-uridine-3'-phosphate
  modified_base 4: mod_base = OTHER; note = 2'-O-methyl-adenosine-3'-phosphate
  modified_base 5: mod_base = OTHER; note = 2'-O-methyl-adenosine-3'-phosphate
  modified_base 6: mod_base = OTHER; note = 2'-deoxy-2'-fluoro-guanosine-3'-phosphate
  modified_base 7: mod_base = OTHER; note = 2'-O-methyl-cytidine-3'-phosphate
  modified_base 8: mod_base = OTHER; note = 2'-deoxy-2'-fluoro-uridine-3'-phosphate
  modified_base 9: mod_base = OTHER; note = 2'-deoxy-2'-fluoro-guanosine-3'-phosphate
  modified_base 10: mod_base = OTHER; note = 2'-O-methyl-adenosine-3'-phosphate
  modified_base 11: mod_base = OTHER; note = 2'-O-methyl-uridine-3'-phosphate
  modified_base 12: mod_base = OTHER; note = 2'-O-methyl-guanosine-3'-phosphate
  modified_base 13: mod_base = OTHER; note = 2'-O-methyl-uridine-3'-phosphate
  modified_base 14: mod_base = OTHER; note = 2'-deoxy-2'-fluoro-guanosine-3'-phosphate
  modified_base 15: mod_base = OTHER; note = 2'-O-methyl-guanosine-3'-phosphate
  modified_base 16: mod_base = OTHER; note = 2'-deoxy-2'-fluoro-cytidine-3'-phosphate
  modified_base 17: mod_base = OTHER; note = 2'-O-methyl-adenosine-3'-phosphate
  modified_base 18: mod_base = OTHER; note = 2'-O-methyl-adenosine-3'-phosphate
  modified_base 19: mod_base = OTHER; note = 2'-O-methyl-guanosine-3'-phosphorothioate
  modified_base 20: mod_base = OTHER; note = 2'-O-methyl-uridine-3'-phosphorothioate
  modified_base 21: mod_base = OTHER; note = 2'-O-methyl-uridine-3'-phosphate
tttaagctgatgtggcaagtt

SEQ ID NO: 2300 - RNA, 21 nt, synthetic construct
  source 1..21: mol_type = other RNA
  modified_base 1: mod_base = OTHER; note = 2'-O-methyl-uridine-3'-phosphorothioate
  modified_base 2: mod_base = OTHER; note = 2'-deoxy-2'-fluoro-uridine-3'-phosphorothioate
  modified_base 3: mod_base = OTHER; note = 2'-O-methyl-uridine-3'-phosphate
  modified_base 4: mod_base = OTHER; note = 2'-O-methyl-uridine-3'-phosphate
  modified_base 5: mod_base = OTHER; note = 2'-O-methyl-adenosine-3'-phosphate
  modified_base 6: mod_base = OTHER; note = 2'-deoxy-2'-fluoro-adenosine-3'-phosphate
  modified_base 7: mod_base = OTHER; note = 2'-O-methyl-guanosine-3'-phosphate
  modified_base 8: mod_base = OTHER; note = 2'-deoxy-2'-fluoro-cytidine-3'-phosphate
  modified_base 9: mod_base = OTHER; note = 2'-deoxy-2'-fluoro-uridine-3'-phosphate
  modified_base 10: mod_base = OTHER; note = 2'-O-methyl-guanosine-3'-phosphate
  modified_base 11: mod_base = OTHER; note = 2'-O-methyl-adenosine-3'-phosphate
  modified_base 12: mod_base = OTHER; note = 2'-O-methyl-uridine-3'-phosphate
  modified_base 13: mod_base = OTHER; note = 2'-O-methyl-guanosine-3'-phosphate
  modified_base 14: mod_base = OTHER; note = 2'-deoxy-2'-fluoro-uridine-3'-phosphate
  modified_base 15: mod_base = OTHER; note = 2'-O-methyl-guanosine-3'-phosphate
  modified_base 16: mod_base = OTHER; note = 2'-deoxy-2'-fluoro-guanosine-3'-phosphate
  modified_base 17: mod_base = OTHER; note = 2'-O-methyl-cytidine-3'-phosphate
  modified_base 18: mod_base = OTHER; note = 2'-O-methyl-adenosine-3'-phosphate
  modified_base 19: mod_base = OTHER; note = 2'-O-methyl-adenosine-3'-phosphorothioate
  modified_base 20: mod_base = OTHER; note = 2'-O-methyl-uridine-3'-phosphorothioate
  modified_base 21: mod_base = OTHER; note = 2'-O-methyl-uridine-3'-phosphate
ttttaagctgatgtggcaatt

SEQ ID NO: 2301 - RNA, 21 nt, synthetic construct
  source 1..21: mol_type = other RNA
  modified_base 1: mod_base = OTHER; note = 2'-O-methyl-uridine-3'-phosphorothioate
  modified_base 2: mod_base = OTHER; note = 2'-deoxy-2'-fluoro-adenosine-3'-phosphorothioate
  modified_base 3: mod_base = OTHER; note = 2'-O-methyl-guanosine-3'-phosphate
  modified_base 4: mod_base = OTHER; note = 2'-O-methyl-adenosine-3'-phosphate
  modified_base 5: mod_base = OTHER; note = 2'-O-methyl-uridine-3'-phosphate
  modified_base 6: mod_base = OTHER; note = 2'-deoxy-2'-fluoro-uridine-3'-phosphate
  modified_base 7: mod_base = OTHER; note = 2'-O-methyl-uridine-3'-phosphate
  modified_base 8: mod_base = OTHER; note = 2'-deoxy-2'-fluoro-uridine-3'-phosphate
  modified_base 9: mod_base = OTHER; note = 2'-deoxy-2'-fluoro-adenosine-3'-phosphate
  modified_base 10: mod_base = OTHER; note = 2'-O-methyl-adenosine-3'-phosphate
  modified_base 11: mod_base = OTHER; note = 2'-O-methyl-guanosine-3'-phosphate
  modified_base 12: mod_base = OTHER; note = 2'-O-methyl-cytidine-3'-phosphate
  modified_base 13: mod_base = OTHER; note = 2'-O-methyl-uridine-3'-phosphate
  modified_base 14: mod_base = OTHER; note = 2'-deoxy-2'-fluoro-guanosine-3'-phosphate
  modified_base 15: mod_base = OTHER; note = 2'-O-methyl-adenosine-3'-phosphate
  modified_base 16: mod_base = OTHER; note = 2'-deoxy-2'-fluoro-uridine-3'-phosphate
  modified_base 17: mod_base = OTHER; note = 2'-O-methyl-guanosine-3'-phosphate
  modified_base 18: mod_base = OTHER; note = 2'-O-methyl-uridine-3'-phosphate
  modified_base 19: mod_base = OTHER; note = 2'-O-methyl-guanosine-3'-phosphorothioate
  modified_base 20: mod_base = OTHER; note = 2'-O-methyl-uridine-3'-phosphorothioate
  modified_base 21: mod_base = OTHER; note = 2'-O-methyl-uridine-3'-phosphate
tagattttaagctgatgtgtt

SEQ ID NO: 2302 - RNA, 21 nt, synthetic construct
  source 1..21: mol_type = other RNA
  modified_base 1: mod_base = OTHER; note = 2'-O-methyl-uridine-3'-phosphorothioate
  modified_base 2: mod_base = OTHER; note = 2'-deoxy-2'-fluoro-cytidine-3'-phosphorothioate
  modified_base 3: mod_base = OTHER; note = 2'-O-methyl-adenosine-3'-phosphate
  modified_base 4: mod_base = OTHER; note = 2'-O-methyl-guanosine-3'-phosphate
  modified_base 5: mod_base = OTHER; note = 2'-O-methyl-adenosine-3'-phosphate
  modified_base 6: mod_base = OTHER; note = 2'-deoxy-2'-fluoro-uridine-3'-phosphate
  modified_base 7: mod_base = OTHER; note = 2'-O-methyl-uridine-3'-phosphate
  modified_base 8: mod_base = OTHER; note = 2'-deoxy-2'-fluoro-uridine-3'-phosphate
  modified_base 9: mod_base = OTHER; note = 2'-deoxy-2'-fluoro-uridine-3'-phosphate
  modified_base 10: mod_base = OTHER; note = 2'-O-methyl-adenosine-3'-phosphate
  modified_base 11: mod_base = OTHER; note = 2'-O-methyl-adenosine-3'-phosphate
  modified_base 12: mod_base = OTHER; note = 2'-O-methyl-guanosine-3'-phosphate
  modified_base 13: mod_base = OTHER; note = 2'-O-methyl-cytidine-3'-phosphate
  modified_base 14: mod_base = OTHER; note = 2'-deoxy-2'-fluoro-uridine-3'-phosphate
  modified_base 15: mod_base = OTHER; note = 2'-O-methyl-guanosine-3'-phosphate
  modified_base 16: mod_base = OTHER; note = 2'-deoxy-2'-fluoro-adenosine-3'-phosphate
  modified_base 17: mod_base = OTHER; note = 2'-O-methyl-uridine-3'-phosphate
  modified_base 18: mod_base = OTHER; note = 2'-O-methyl-guanosine-3'-phosphate
  modified_base 19: mod_base = OTHER; note = 2'-O-methyl-uridine-3'-phosphorothioate
  modified_base 20: mod_base = OTHER; note = 2'-O-methyl-uridine-3'-phosphorothioate
  modified_base 21: mod_base = OTHER; note = 2'-O-methyl-uridine-3'-phosphate
tcagattttaagctgatgttt

SEQ ID NO: 2303 - RNA, 21 nt, synthetic construct
  source 1..21: mol_type = other RNA
  modified_base 1: mod_base = OTHER; note = 2'-O-methyl-uridine-3'-phosphorothioate
  modified_base 2: mod_base = OTHER; note = 2'-deoxy-2'-fluoro-adenosine-3'-phosphorothioate
  modified_base 3: mod_base = OTHER; note = 2'-O-methyl-cytidine-3'-phosphate
  modified_base 4: mod_base = OTHER; note = 2'-O-methyl-adenosine-3'-phosphate
  modified_base 5: mod_base = OTHER; note = 2'-O-methyl-guanosine-3'-phosphate
  modified_base 6: mod_base = OTHER; note = 2'-deoxy-2'-fluoro-adenosine-3'-phosphate
  modified_base 7: mod_base = OTHER; note = 2'-O-methyl-uridine-3'-phosphate
  modified_base 8: mod_base = OTHER; note = 2'-deoxy-2'-fluoro-uridine-3'-phosphate
  modified_base 9: mod_base = OTHER; note = 2'-deoxy-2'-fluoro-uridine-3'-phosphate
  modified_base 10: mod_base = OTHER; note = 2'-O-methyl-uridine-3'-phosphate
  modified_base 11: mod_base = OTHER; note = 2'-O-methyl-adenosine-3'-phosphate
  modified_base 12: mod_base = OTHER; note = 2'-O-methyl-adenosine-3'-phosphate
  modified_base 13: mod_base = OTHER; note = 2'-O-methyl-guanosine-3'-phosphate
  modified_base 14: mod_base = OTHER; note = 2'-deoxy-2'-fluoro-cytidine-3'-phosphate
  modified_base 15: mod_base = OTHER; note = 2'-O-methyl-uridine-3'-phosphate
  modified_base 16: mod_base = OTHER; note = 2'-deoxy-2'-fluoro-guanosine-3'-phosphate
  modified_base 17: mod_base = OTHER; note = 2'-O-methyl-adenosine-3'-phosphate
  modified_base 18: mod_base = OTHER; note = 2'-O-methyl-uridine-3'-phosphate
  modified_base 19: mod_base = OTHER; note = 2'-O-methyl-guanosine-3'-phosphorothioate
  modified_base 20: mod_base = OTHER; note = 2'-O-methyl-uridine-3'-phosphorothioate
  modified_base 21: mod_base = OTHER; note = 2'-O-methyl-uridine-3'-phosphate
tacagattttaagctgatgtt

SEQ ID NO: 2304 - RNA, 21 nt, synthetic construct
  source 1..21: mol_type = other RNA
  modified_base 1: mod_base = OTHER; note = 2'-O-methyl-uridine-3'-phosphorothioate
  modified_base 2: mod_base = OTHER; note = 2'-deoxy-2'-fluoro-guanosine-3'-phosphorothioate
  modified_base 3: mod_base = OTHER; note = 2'-O-methyl-adenosine-3'-phosphate
  modified_base 4: mod_base = OTHER; note = 2'-O-methyl-cytidine-3'-phosphate
  modified_base 5: mod_base = OTHER; note = 2'-O-methyl-adenosine-3'-phosphate
  modified_base 6: mod_base = OTHER; note = 2'-deoxy-2'-fluoro-guanosine-3'-phosphate
  modified_base 7: mod_base = OTHER; note = 2'-O-methyl-adenosine-3'-phosphate
  modified_base 8: mod_base = OTHER; note = 2'-deoxy-2'-fluoro-uridine-3'-phosphate
  modified_base 9: mod_base = OTHER; note = 2'-deoxy-2'-fluoro-uridine-3'-phosphate
  modified_base 10: mod_base = OTHER; note = 2'-O-methyl-uridine-3'-phosphate
  modified_base 11: mod_base = OTHER; note = 2'-O-methyl-uridine-3'-phosphate
  modified_base 12: mod_base = OTHER; note = 2'-O-methyl-adenosine-3'-phosphate
  modified_base 13: mod_base = OTHER; note = 2'-O-methyl-adenosine-3'-phosphate
  modified_base 14: mod_base = OTHER; note = 2'-deoxy-2'-fluoro-guanosine-3'-phosphate
  modified_base 15: mod_base = OTHER; note = 2'-O-methyl-cytidine-3'-phosphate
  modified_base 16: mod_base = OTHER; note = 2'-deoxy-2'-fluoro-uridine-3'-phosphate
  modified_base 17: mod_base = OTHER; note = 2'-O-methyl-guanosine-3'-phosphate
  modified_base 18: mod_base = OTHER; note = 2'-O-methyl-adenosine-3'-phosphate
  modified_base 19: mod_base = OTHER; note = 2'-O-methyl-uridine-3'-phosphorothioate
  modified_base 20: mod_base = OTHER; note = 2'-O-methyl-uridine-3'-phosphorothioate
  modified_base 21: mod_base = OTHER; note = 2'-O-methyl-uridine-3'-phosphate
tgacagattttaagctgattt

SEQ ID NO: 2305 - RNA, 21 nt, synthetic construct
  source 1..21: mol_type = other RNA
  modified_base 1: mod_base = OTHER; note = 2'-O-methyl-uridine-3'-phosphorothioate
  modified_base 2: mod_base = OTHER; note = 2'-deoxy-2'-fluoro-uridine-3'-phosphorothioate
  modified_base 3: mod_base = OTHER; note = 2'-O-methyl-guanosine-3'-phosphate
  modified_base 4: mod_base = OTHER; note = 2'-O-methyl-adenosine-3'-phosphate
  modified_base 5: mod_base = OTHER; note = 2'-O-methyl-cytidine-3'-phosphate
  modified_base 6: mod_base = OTHER; note = 2'-deoxy-2'-fluoro-adenosine-3'-phosphate
  modified_base 7: mod_base = OTHER; note = 2'-O-methyl-guanosine-3'-phosphate
  modified_base 8: mod_base = OTHER; note = 2'-deoxy-2'-fluoro-adenosine-3'-phosphate
  modified_base 9: mod_base = OTHER; note = 2'-deoxy-2'-fluoro-uridine-3'-phosphate
  modified_base 10: mod_base = OTHER; note = 2'-O-methyl-uridine-3'-phosphate
  modified_base 11: mod_base = OTHER; note = 2'-O-methyl-uridine-3'-phosphate
  modified_base 12: mod_base = OTHER; note = 2'-O-methyl-uridine-3'-phosphate
  modified_base 13: mod_base = OTHER; note = 2'-O-methyl-adenosine-3'-phosphate
  modified_base 14: mod_base = OTHER; note = 2'-deoxy-2'-fluoro-adenosine-3'-phosphate
  modified_base 15: mod_base = OTHER; note = 2'-O-methyl-guanosine-3'-phosphate
  modified_base 16: mod_base = OTHER; note = 2'-deoxy-2'-fluoro-cytidine-3'-phosphate
  modified_base 17: mod_base = OTHER; note = 2'-O-methyl-uridine-3'-phosphate
  modified_base 18: mod_base = OTHER; note = 2'-O-methyl-guanosine-3'-phosphate
  modified_base 19: mod_base = OTHER; note = 2'-O-methyl-adenosine-3'-phosphorothioate
  modified_base 20: mod_base = OTHER; note = 2'-O-methyl-uridine-3'-phosphorothioate
  modified_base 21: mod_base = OTHER; note = 2'-O-methyl-uridine-3'-phosphate
ttgacagattttaagctgatt

SEQ ID NO: 2306 - RNA, 21 nt, synthetic construct
  source 1..21: mol_type = other RNA
  modified_base 1: mod_base = OTHER; note = 2'-O-methyl-uridine-3'-phosphorothioate
  modified_base 2: mod_base = OTHER; note = 2'-deoxy-2'-fluoro-adenosine-3'-phosphorothioate
  modified_base 3: mod_base = OTHER; note = 2'-O-methyl-uridine-3'-phosphate
  modified_base 4: mod_base = OTHER; note = 2'-O-methyl-guanosine-3'-phosphate
  modified_base 5: mod_base = OTHER; note = 2'-O-methyl-adenosine-3'-phosphate
  modified_base 6: mod_base = OTHER; note = 2'-deoxy-2'-fluoro-cytidine-3'-phosphate
  modified_base 7: mod_base = OTHER; note = 2'-O-methyl-adenosine-3'-phosphate
  modified_base 8: mod_base = OTHER; note = 2'-deoxy-2'-fluoro-guanosine-3'-phosphate
  modified_base 9: mod_base = OTHER; note = 2'-deoxy-2'-fluoro-adenosine-3'-phosphate
  modified_base 10: mod_base = OTHER; note = 2'-O-methyl-uridine-3'-phosphate
  modified_base 11: mod_base = OTHER; note = 2'-O-methyl-uridine-3'-phosphate
  modified_base 12: mod_base = OTHER; note = 2'-O-methyl-uridine-3'-phosphate
  modified_base 13: mod_base = OTHER; note = 2'-O-methyl-uridine-3'-phosphate
  modified_base 14: mod_base = OTHER; note = 2'-deoxy-2'-fluoro-adenosine-3'-phosphate
  modified_base 15: mod_base = OTHER; note = 2'-O-methyl-adenosine-3'-phosphate
  modified_base 16: mod_base = OTHER; note = 2'-deoxy-2'-fluoro-guanosine-3'-phosphate
  modified_base 17: mod_base = OTHER; note = 2'-O-methyl-cytidine-3'-phosphate
  modified_base 18: mod_base = OTHER; note = 2'-O-methyl-uridine-3'-phosphate
  modified_base 19: mod_base = OTHER; note = 2'-O-methyl-guanosine-3'-phosphorothioate
  modified_base 20: mod_base = OTHER; note = 2'-O-methyl-uridine-3'-phosphorothioate
  modified_base 21: mod_base = OTHER; note = 2'-O-methyl-uridine-3'-phosphate
tatgacagattttaagctgtt

SEQ ID NO: 2307 - RNA, 21 nt, synthetic construct
  source 1..21: mol_type = other RNA
  modified_base 1: mod_base = OTHER; note = 2'-O-methyl-uridine-3'-phosphorothioate
  modified_base 2: mod_base = OTHER; note = 2'-deoxy-2'-fluoro-guanosine-3'-phosphorothioate
  modified_base 3: mod_base = OTHER; note = 2'-O-methyl-adenosine-3'-phosphate
  modified_base 4: mod_base = OTHER; note = 2'-O-methyl-uridine-3'-phosphate
  modified_base 5: mod_base = OTHER; note = 2'-O-methyl-guanosine-3'-phosphate
  modified_base 6: mod_base = OTHER; note = 2'-deoxy-2'-fluoro-adenosine-3'-phosphate
  modified_base 7: mod_base = OTHER; note = 2'-O-methyl-cytidine-3'-phosphate
  modified_base 8: mod_base = OTHER; note = 2'-deoxy-2'-fluoro-adenosine-3'-phosphate
  modified_base 9: mod_base = OTHER; note = 2'-deoxy-2'-fluoro-guanosine-3'-phosphate
  modified_base 10: mod_base = OTHER; note = 2'-O-methyl-adenosine-3'-phosphate
  modified_base 11: mod_base = OTHER; note = 2'-O-methyl-uridine-3'-phosphate
  modified_base 12: mod_base = OTHER; note = 2'-O-methyl-uridine-3'-phosphate
  modified_base 13: mod_base = OTHER; note = 2'-O-methyl-uridine-3'-phosphate
  modified_base 14: mod_base = OTHER; note = 2'-deoxy-2'-fluoro-uridine-3'-phosphate
  modified_base 15: mod_base = OTHER; note = 2'-O-methyl-adenosine-3'-phosphate
  modified_base 16: mod_base = OTHER; note = 2'-deoxy-2'-fluoro-adenosine-3'-phosphate
  modified_base 17: mod_base = OTHER; note = 2'-O-methyl-guanosine-3'-phosphate
  modified_base 18: mod_base = OTHER; note = 2'-O-methyl-cytidine-3'-phosphate
  modified_base 19: mod_base = OTHER; note = 2'-O-methyl-uridine-3'-phosphorothioate
  modified_base 20: mod_base = OTHER; note = 2'-O-methyl-uridine-3'-phosphorothioate
  modified_base 21: mod_base = OTHER; note = 2'-O-methyl-uridine-3'-phosphate
tgatgacagattttaagcttt

SEQ ID NO: 2308 - RNA, 21 nt, synthetic construct
  source 1..21: mol_type = other RNA
  modified_base 1: mod_base = OTHER; note = 2'-O-methyl-uridine-3'-phosphorothioate
  modified_base 2: mod_base = OTHER; note = 2'-deoxy-2'-fluoro-guanosine-3'-phosphorothioate
  modified_base 3: mod_base = OTHER; note = 2'-O-methyl-guanosine-3'-phosphate
  modified_base 4: mod_base = OTHER; note = 2'-O-methyl-adenosine-3'-phosphate
  modified_base 5: mod_base = OTHER; note = 2'-O-methyl-uridine-3'-phosphate
  modified_base 6: mod_base = OTHER; note = 2'-deoxy-2'-fluoro-guanosine-3'-phosphate
  modified_base 7: mod_base = OTHER; note = 2'-O-methyl-adenosine-3'-phosphate
  modified_base 8: mod_base = OTHER; note = 2'-deoxy-2'-fluoro-cytidine-3'-phosphate
  modified_base 9: mod_base = OTHER; note = 2'-deoxy-2'-fluoro-adenosine-3'-phosphate
  modified_base 10: mod_base = OTHER; note = 2'-O-methyl-guanosine-3'-phosphate
  modified_base 11: mod_base = OTHER; note = 2'-O-methyl-adenosine-3'-phosphate
  modified_base 12: mod_base = OTHER; note = 2'-O-methyl-uridine-3'-phosphate
  modified_base 13: mod_base = OTHER; note = 2'-O-methyl-uridine-3'-phosphate
  modified_base 14: mod_base = OTHER; note = 2'-deoxy-2'-fluoro-uridine-3'-phosphate
  modified_base 15: mod_base = OTHER; note = 2'-O-methyl-uridine-3'-phosphate
  modified_base 16: mod_base = OTHER; note = 2'-deoxy-2'-fluoro-adenosine-3'-phosphate
  modified_base 17: mod_base = OTHER; note = 2'-O-methyl-adenosine-3'-phosphate
  modified_base 18: mod_base = OTHER; note = 2'-O-methyl-guanosine-3'-phosphate
  modified_base 19: mod_base = OTHER; note = 2'-O-methyl-cytidine-3'-phosphorothioate
  modified_base 20: mod_base = OTHER; note = 2'-O-methyl-uridine-3'-phosphorothioate
  modified_base 21: mod_base = OTHER; note = 2'-O-methyl-uridine-3'-phosphate
tggatgacagattttaagctt

SEQ ID NO: 2309 - RNA, 21 nt, synthetic construct
  source 1..21: mol_type = other RNA
  modified_base 1: mod_base = OTHER; note = 2'-O-methyl-uridine-3'-phosphorothioate
  modified_base 2: mod_base = OTHER; note = 2'-deoxy-2'-fluoro-uridine-3'-phosphorothioate
  modified_base 3: mod_base = OTHER; note = 2'-O-methyl-cytidine-3'-phosphate
  modified_base 4: mod_base = OTHER; note = 2'-O-methyl-adenosine-3'-phosphate
  modified_base 5: mod_base = OTHER; note = 2'-O-methyl-guanosine-3'-phosphate
  modified_base 6: mod_base = OTHER; note = 2'-deoxy-2'-fluoro-guanosine-3'-phosphate
  modified_base 7: mod_base = OTHER; note = 2'-O-methyl-adenosine-3'-phosphate
  modified_base 8: mod_base = OTHER; note = 2'-deoxy-2'-fluoro-adenosine-3'-phosphate
  modified_base 9: mod_base = OTHER; note = 2'-deoxy-2'-fluoro-guanosine-3'-phosphate
  modified_base 10: mod_base = OTHER; note = 2'-O-methyl-uridine-3'-phosphate
  modified_base 11: mod_base = OTHER; note = 2'-O-methyl-guanosine-3'-phosphate
  modified_base 12: mod_base = OTHER; note = 2'-O-methyl-guanosine-3'-phosphate
  modified_base 13: mod_base = OTHER; note = 2'-O-methyl-uridine-3'-phosphate
  modified_base 14: mod_base = OTHER; note = 2'-deoxy-2'-fluoro-cytidine-3'-phosphate
  modified_base 15: mod_base = OTHER; note = 2'-O-methyl-uridine-3'-phosphate
  modified_base 16: mod_base = OTHER; note = 2'-deoxy-2'-fluoro-guanosine-3'-phosphate
  modified_base 17: mod_base = OTHER; note = 2'-O-methyl-uridine-3'-phosphate
  modified_base 18: mod_base = OTHER; note = 2'-O-methyl-uridine-3'-phosphate
  modified_base 19: mod_base = OTHER; note = 2'-O-methyl-adenosine-3'-phosphorothioate
  modified_base 20: mod_base = OTHER; note = 2'-O-methyl-uridine-3'-phosphorothioate
  modified_base 21: mod_base = OTHER; note = 2'-O-methyl-uridine-3'-phosphate
ttcaggaagtggtctgttatt

SEQ ID NO: 2310 - RNA, 21 nt, synthetic construct
  source 1..21: mol_type = other RNA
  modified_base 1: mod_base = OTHER; note = 2'-O-methyl-uridine-3'-phosphorothioate
  modified_base 2: mod_base = OTHER; note = 2'-deoxy-2'-fluoro-adenosine-3'-phosphorothioate
  modified_base 3: mod_base = OTHER; note = 2'-O-methyl-cytidine-3'-phosphate
  modified_base 4: mod_base = OTHER; note = 2'-O-methyl-uridine-3'-phosphate
  modified_base 5: mod_base = OTHER; note = 2'-O-methyl-cytidine-3'-phosphate
  modified_base 6: mod_base = OTHER; note = 2'-deoxy-2'-fluoro-adenosine-3'-phosphate
  modified_base 7: mod_base = OTHER; note = 2'-O-methyl-guanosine-3'-phosphate
  modified_base 8: mod_base = OTHER; note = 2'-deoxy-2'-fluoro-guanosine-3'-phosphate
  modified_base 9: mod_base = OTHER; note = 2'-deoxy-2'-fluoro-adenosine-3'-phosphate
  modified_base 10: mod_base = OTHER; note = 2'-O-methyl-adenosine-3'-phosphate
  modified_base 11: mod_base = OTHER; note = 2'-O-methyl-guanosine-3'-phosphate
  modified_base 12: mod_base = OTHER; note = 2'-O-methyl-uridine-3'-phosphate
  modified_base 13: mod_base = OTHER; note = 2'-O-methyl-guanosine-3'-phosphate
  modified_base 14: mod_base = OTHER; note = 2'-deoxy-2'-fluoro-guanosine-3'-phosphate
  modified_base 15: mod_base = OTHER; note = 2'-O-methyl-uridine-3'-phosphate
  modified_base 16: mod_base = OTHER; note = 2'-deoxy-2'-fluoro-cytidine-3'-phosphate
  modified_base 17: mod_base = OTHER; note = 2'-O-methyl-uridine-3'-phosphate
  modified_base 18: mod_base = OTHER; note = 2'-O-methyl-guanosine-3'-phosphate
  modified_base 19: mod_base = OTHER; note = 2'-O-methyl-uridine-3'-phosphorothioate
  modified_base 20: mod_base = OTHER; note = 2'-O-methyl-uridine-3'-phosphorothioate
  modified_base 21: mod_base = OTHER; note = 2'-O-methyl-uridine-3'-phosphate
tactcaggaagtggtctgttt

SEQ ID NO: 2311 - RNA, 21 nt, synthetic construct
  source 1..21: mol_type = other RNA
  modified_base 1: mod_base = OTHER; note = 2'-O-methyl-uridine-3'-phosphorothioate
  modified_base 2: mod_base = OTHER; note = 2'-deoxy-2'-fluoro-uridine-3'-phosphorothioate
  modified_base 3: mod_base = OTHER; note = 2'-O-methyl-adenosine-3'-phosphate
  modified_base 4: mod_base = OTHER; note = 2'-O-methyl-cytidine-3'-phosphate
  modified_base 5: mod_base = OTHER; note = 2'-O-methyl-uridine-3'-phosphate
  modified_base 6: mod_base = OTHER; note = 2'-deoxy-2'-fluoro-cytidine-3'-phosphate
  modified_base 7: mod_base = OTHER; note = 2'-O-methyl-adenosine-3'-phosphate
  modified_base 8: mod_base = OTHER; note = 2'-deoxy-2'-fluoro-guanosine-3'-phosphate
  modified_base 9: mod_base = OTHER; note = 2'-deoxy-2'-fluoro-guanosine-3'-phosphate
  modified_base 10: mod_base = OTHER; note = 2'-O-methyl-adenosine-3'-phosphate
  modified_base 11: mod_base = OTHER; note = 2'-O-methyl-adenosine-3'-phosphate
  modified_base 12: mod_base = OTHER; note = 2'-O-methyl-guanosine-3'-phosphate
  modified_base 13: mod_base = OTHER; note = 2'-O-methyl-uridine-3'-phosphate
  modified_base 14: mod_base = OTHER; note = 2'-deoxy-2'-fluoro-guanosine-3'-phosphate
  modified_base 15: mod_base = OTHER; note = 2'-O-methyl-guanosine-3'-phosphate
  modified_base 16: mod_base = OTHER; note = 2'-deoxy-2'-fluoro-uridine-3'-phosphate
  modified_base 17: mod_base = OTHER; note = 2'-O-methyl-cytidine-3'-phosphate
  modified_base 18: mod_base = OTHER; note = 2'-O-methyl-uridine-3'-phosphate
  modified_base 19: mod_base = OTHER; note = 2'-O-methyl-guanosine-3'-phosphorothioate
  modified_base 20: mod_base = OTHER; note = 2'-O-methyl-uridine-3'-phosphorothioate
  modified_base 21: mod_base = OTHER; note = 2'-O-methyl-uridine-3'-phosphate
ttactcaggaagtggtctgtt

SEQ ID NO: 2312 - RNA, 21 nt, synthetic construct
  source 1..21: mol_type = other RNA
  modified_base 1: mod_base = OTHER; note = 2'-O-methyl-uridine-3'-phosphorothioate
  modified_base 2: mod_base = OTHER; note = 2'-deoxy-2'-fluoro-cytidine-3'-phosphorothioate
  modified_base 3: mod_base = OTHER; note = 2'-O-methyl-uridine-3'-phosphate
  modified_base 4: mod_base = OTHER; note = 2'-O-methyl-adenosine-3'-phosphate
  modified_base 5: mod_base = OTHER; note = 2'-O-methyl-cytidine-3'-phosphate
  modified_base 6: mod_base = OTHER; note = 2'-deoxy-2'-fluoro-uridine-3'-phosphate
  modified_base 7: mod_base = OTHER; note = 2'-O-methyl-cytidine-3'-phosphate
  modified_base 8: mod_base = OTHER; note = 2'-deoxy-2'-fluoro-adenosine-3'-phosphate
  modified_base 9: mod_base = OTHER; note = 2'-deoxy-2'-fluoro-guanosine-3'-phosphate
  modified_base 10: mod_base = OTHER; note = 2'-O-methyl-guanosine-3'-phosphate
  modified_base 11: mod_base = OTHER; note = 2'-O-methyl-adenosine-3'-phosphate
  modified_base 12: mod_base = OTHER; note = 2'-O-methyl-adenosine-3'-phosphate
  modified_base 13: mod_base = OTHER; note = 2'-O-methyl-guanosine-3'-phosphate
  modified_base 14: mod_base = OTHER; note = 2'-deoxy-2'-fluoro-uridine-3'-phosphate
  modified_base 15: mod_base = OTHER; note = 2'-O-methyl-guanosine-3'-phosphate
  modified_base 16: mod_base = OTHER; note = 2'-deoxy-2'-fluoro-guanosine-3'-phosphate
  modified_base 17: mod_base = OTHER; note = 2'-O-methyl-uridine-3'-phosphate
  modified_base 18: mod_base = OTHER; note = 2'-O-methyl-cytidine-3'-phosphate
  modified_base 19: mod_base = OTHER; note = 2'-O-methyl-uridine-3'-phosphorothioate
  modified_base 20: mod_base = OTHER; note = 2'-O-methyl-uridine-3'-phosphorothioate
  modified_base 21: mod_base = OTHER; note = 2'-O-methyl-uridine-3'-phosphate
tctactcaggaagtggtcttt

SEQ ID NO: 2313 - RNA, 21 nt, synthetic construct
  source 1..21: mol_type = other RNA
  modified_base 1: mod_base = OTHER; note = 2'-O-methyl-uridine-3'-phosphorothioate
  modified_base 2: mod_base = OTHER; note = 2'-deoxy-2'-fluoro-uridine-3'-phosphorothioate
  modified_base 3: mod_base = OTHER; note = 2'-O-methyl-cytidine-3'-phosphate
  modified_base 4: mod_base = OTHER; note = 2'-O-methyl-uridine-3'-phosphate
  modified_base 5: mod_base = OTHER; note = 2'-O-methyl-adenosine-3'-phosphate
  modified_base 6: mod_base = OTHER; note = 2'-deoxy-2'-fluoro-cytidine-3'-phosphate
  modified_base 7: mod_base = OTHER; note = 2'-O-methyl-uridine-3'-phosphate
  modified_base 8: mod_base = OTHER; note = 2'-deoxy-2'-fluoro-cytidine-3'-phosphate
  modified_base 9: mod_base = OTHER; note = 2'-deoxy-2'-fluoro-adenosine-3'-phosphate
  modified_base 10: mod_base = OTHER; note = 2'-O-methyl-guanosine-3'-phosphate
  modified_base 11: mod_base = OTHER; note = 2'-O-methyl-guanosine-3'-phosphate
  modified_base 12: mod_base = OTHER; note = 2'-O-methyl-adenosine-3'-phosphate
  modified_base 13: mod_base = OTHER; note = 2'-O-methyl-adenosine-3'-phosphate
  modified_base 14: mod_base = OTHER; note = 2'-deoxy-2'-fluoro-guanosine-3'-phosphate
  modified_base 15: mod_base = OTHER; note = 2'-O-methyl-uridine-3'-phosphate
  modified_base 16: mod_base = OTHER; note = 2'-deoxy-2'-fluoro-guanosine-3'-phosphate
  modified_base 17: mod_base = OTHER; note = 2'-O-methyl-guanosine-3'-phosphate
  modified_base 18: mod_base = OTHER; note = 2'-O-methyl-uridine-3'-phosphate
  modified_base 19: mod_base = OTHER; note = 2'-O-methyl-cytidine-3'-phosphorothioate
  modified_base 20: mod_base = OTHER; note = 2'-O-methyl-uridine-3'-phosphorothioate
  modified_base 21: mod_base = OTHER; note = 2'-O-methyl-uridine-3'-phosphate
ttctactcaggaagtggtctt

SEQ ID NO: 2314 - RNA, 21 nt, synthetic construct
  source 1..21: mol_type = other RNA
  modified_base 1: mod_base = OTHER; note = 2'-O-methyl-uridine-3'-phosphorothioate
  modified_base 2: mod_base = OTHER; note = 2'-deoxy-2'-fluoro-adenosine-3'-phosphorothioate
  modified_base 3: mod_base = OTHER; note = 2'-O-methyl-adenosine-3'-phosphate
  modified_base 4: mod_base = OTHER; note = 2'-O-methyl-cytidine-3'-phosphate
  modified_base 5: mod_base = OTHER; note = 2'-O-methyl-uridine-3'-phosphate
  modified_base 6: mod_base = OTHER; note = 2'-deoxy-2'-fluoro-cytidine-3'-phosphate
  modified_base 7: mod_base = OTHER; note = 2'-O-methyl-uridine-3'-phosphate
  modified_base 8: mod_base = OTHER; note = 2'-deoxy-2'-fluoro-uridine-3'-phosphate
  modified_base 9: mod_base = OTHER; note = 2'-deoxy-2'-fluoro-cytidine-3'-phosphate
  modified_base 10: mod_base = OTHER; note = 2'-O-methyl-uridine-3'-phosphate
  modified_base 11: mod_base = OTHER; note = 2'-O-methyl-adenosine-3'-phosphate
  modified_base 12: mod_base = OTHER; note = 2'-O-methyl-cytidine-3'-phosphate
  modified_base 13: mod_base = OTHER; note = 2'-O-methyl-uridine-3'-phosphate
  modified_base 14: mod_base = OTHER; note = 2'-deoxy-2'-fluoro-cytidine-3'-phosphate
  modified_base 15: mod_base = OTHER; note = 2'-O-methyl-adenosine-3'-phosphate
  modified_base 16: mod_base = OTHER; note = 2'-deoxy-2'-fluoro-guanosine-3'-phosphate
  modified_base 17: mod_base = OTHER; note = 2'-O-methyl-guanosine-3'-phosphate
  modified_base 18: mod_base = OTHER; note = 2'-O-methyl-adenosine-3'-phosphate
  modified_base 19: mod_base = OTHER; note = 2'-O-methyl-adenosine-3'-phosphorothioate
  modified_base 20: mod_base = OTHER; note = 2'-O-methyl-uridine-3'-phosphorothioate
  modified_base 21: mod_base = OTHER; note = 2'-O-methyl-uridine-3'-phosphate
taactcttctactcaggaatt

SEQ ID NO: 2315 - RNA, 21 nt, synthetic construct
  source 1..21: mol_type = other RNA
  modified_base 1: mod_base = OTHER; note = 2'-O-methyl-uridine-3'-phosphorothioate
  modified_base 2: mod_base = OTHER; note = 2'-deoxy-2'-fluoro-uridine-3'-phosphorothioate
  modified_base 3: mod_base = OTHER; note = 2'-O-methyl-cytidine-3'-phosphate
  modified_base 4: mod_base = OTHER; note = 2'-O-methyl-uridine-3'-phosphate
  modified_base 5: mod_base = OTHER; note = 2'-O-methyl-uridine-3'-phosphate
  modified_base 6: mod_base = OTHER; note = 2'-deoxy-2'-fluoro-guanosine-3'-phosphate
  modified_base 7: mod_base = OTHER; note = 2'-O-methyl-adenosine-3'-phosphate
  modified_base 8: mod_base = OTHER; note = 2'-deoxy-2'-fluoro-cytidine-3'-phosphate
  modified_base 9: mod_base = OTHER; note = 2'-deoxy-2'-fluoro-cytidine-3'-phosphate
  modified_base 10: mod_base = OTHER; note = 2'-O-methyl-uridine-3'-phosphate
  modified_base 11: mod_base = OTHER; note = 2'-O-methyl-uridine-3'-phosphate
  modified_base 12: mod_base = OTHER; note = 2'-O-methyl-uridine-3'-phosphate
  modified_base 13: mod_base = OTHER; note = 2'-O-methyl-uridine-3'-phosphate
  modified_base 14: mod_base = OTHER; note = 2'-deoxy-2'-fluoro-cytidine-3'-phosphate
  modified_base 15: mod_base = OTHER; note = 2'-O-methyl-adenosine-3'-phosphate
  modified_base 16: mod_base = OTHER; note = 2'-deoxy-2'-fluoro-cytidine-3'-phosphate
  modified_base 17: mod_base = OTHER; note = 2'-O-methyl-adenosine-3'-phosphate
  modified_base 18: mod_base = OTHER; note = 2'-O-methyl-adenosine-3'-phosphate
  modified_base 19: mod_base = OTHER; note = 2'-O-methyl-adenosine-3'-phosphorothioate
  modified_base 20: mod_base = OTHER; note = 2'-O-methyl-uridine-3'-phosphorothioate
  modified_base 21: mod_base = OTHER; note = 2'-O-methyl-uridine-3'-phosphate
ttcttgaccttttcacaaatt

SEQ ID NO: 2316 - RNA, 21 nt, synthetic construct
  source 1..21: mol_type = other RNA
  modified_base 1: mod_base = OTHER; note = 2'-O-methyl-uridine-3'-phosphorothioate
  modified_base 2: mod_base = OTHER; note = 2'-deoxy-2'-fluoro-uridine-3'-phosphorothioate
  modified_base 3: mod_base = OTHER; note = 2'-O-methyl-adenosine-3'-phosphate
  modified_base 4: mod_base = OTHER; note = 2'-O-methyl-adenosine-3'-phosphate
  modified_base 5: mod_base = OTHER; note = 2'-O-methyl-uridine-3'-phosphate
  modified_base 6: mod_base = OTHER; note = 2'-deoxy-2'-fluoro-cytidine-3'-phosphate
  modified_base 7: mod_base = OTHER; note = 2'-O-methyl-uridine-3'-phosphate
  modified_base 8: mod_base = OTHER; note = 2'-deoxy-2'-fluoro-uridine-3'-phosphate
  modified_base 9: mod_base = OTHER; note = 2'-deoxy-2'-fluoro-guanosine-3'-phosphate
  modified_base 10: mod_base = OTHER; note = 2'-O-methyl-adenosine-3'-phosphate
  modified_base 11: mod_base = OTHER; note = 2'-O-methyl-cytidine-3'-phosphate
  modified_base 12: mod_base = OTHER; note = 2'-O-methyl-cytidine-3'-phosphate
  modified_base 13: mod_base = OTHER; note = 2'-O-methyl-uridine-3'-phosphate
  modified_base 14: mod_base = OTHER; note = 2'-deoxy-2'-fluoro-uridine-3'-phosphate
  modified_base 15: mod_base = OTHER; note = 2'-O-methyl-uridine-3'-phosphate
  modified_base 16: mod_base = OTHER; note = 2'-deoxy-2'-fluoro-uridine-3'-phosphate
  modified_base 17: mod_base = OTHER; note = 2'-O-methyl-cytidine-3'-phosphate
  modified_base 18: mod_base = OTHER; note = 2'-O-methyl-adenosine-3'-phosphate
  modified_base 19: mod_base = OTHER; note = 2'-O-methyl-cytidine-3'-phosphorothioate
  modified_base 20: mod_base = OTHER; note = 2'-O-methyl-uridine-3'-phosphorothioate
  modified_base 21: mod_base = OTHER; note = 2'-O-methyl-uridine-3'-phosphate
ttaatcttgaccttttcactt

SEQ ID NO: 2317 - RNA, 21 nt, synthetic construct
  source 1..21: mol_type = other RNA
  modified_base 1: mod_base = OTHER; note = 2'-O-methyl-uridine-3'-phosphorothioate
  modified_base 2: mod_base = OTHER; note = 2'-deoxy-2'-fluoro-uridine-3'-phosphorothioate
  modified_base 3: mod_base = OTHER; note = 2'-O-methyl-uridine-3'-phosphate
  modified_base 4: mod_base = OTHER; note = 2'-O-methyl-adenosine-3'-phosphate
  modified_base 5: mod_base = OTHER; note = 2'-O-methyl-adenosine-3'-phosphate
  modified_base 6: mod_base = OTHER; note = 2'-deoxy-2'-fluoro-uridine-3'-phosphate
  modified_base 7: mod_base = OTHER; note = 2'-O-methyl-cytidine-3'-phosphate
  modified_base 8: mod_base = OTHER; note = 2'-deoxy-2'-fluoro-uridine-3'-phosphate
  modified_base 9: mod_base = OTHER; note = 2'-deoxy-2'-fluoro-uridine-3'-phosphate
  modified_base 10: mod_base = OTHER; note = 2'-O-methyl-guanosine-3'-phosphate
  modified_base 11: mod_base = OTHER; note = 2'-O-methyl-adenosine-3'-phosphate
  modified_base 12: mod_base = OTHER; note = 2'-O-methyl-cytidine-3'-phosphate
  modified_base 13: mod_base = OTHER; note = 2'-O-methyl-cytidine-3'-phosphate
  modified_base 14: mod_base = OTHER; note = 2'-deoxy-2'-fluoro-uridine-3'-phosphate
  modified_base 15: mod_base = OTHER; note = 2'-O-methyl-uridine-3'-phosphate
  modified_base 16: mod_base = OTHER; note = 2'-deoxy-2'-fluoro-uridine-3'-phosphate
  modified_base 17: mod_base = OTHER; note = 2'-O-methyl-uridine-3'-phosphate
  modified_base 18: mod_base = OTHER; note = 2'-O-methyl-cytidine-3'-phosphate
  modified_base 19: mod_base = OTHER; note = 2'-O-methyl-adenosine-3'-phosphorothioate
  modified_base 20: mod_base = OTHER; note = 2'-O-methyl-uridine-3'-phosphorothioate
  modified_base 21: mod_base = OTHER; note = 2'-O-methyl-uridine-3'-phosphate
tttaatcttgaccttttcatt

SEQ ID NO: 2318 - RNA, 21 nt, synthetic construct
  source 1..21: mol_type = other RNA
  modified_base 1: mod_base = OTHER; note = 2'-O-methyl-uridine-3'-phosphorothioate
  modified_base 2: mod_base = OTHER; note = 2'-deoxy-2'-fluoro-cytidine-3'-phosphorothioate
  modified_base 3: mod_base = OTHER; note = 2'-O-methyl-uridine-3'-phosphate
  modified_base 4: mod_base = OTHER; note = 2'-O-methyl-uridine-3'-phosphate
  modified_base 5: mod_base = OTHER; note = 2'-O-methyl-adenosine-3'-phosphate
  modified_base 6: mod_base = OTHER; note = 2'-deoxy-2'-fluoro-adenosine-3'-phosphate
  modified_base 7: mod_base = OTHER; note = 2'-O-methyl-uridine-3'-phosphate
  modified_base 8: mod_base = OTHER; note = 2'-deoxy-2'-fluoro-cytidine-3'-phosphate
  modified_base 9: mod_base = OTHER; note = 2'-deoxy-2'-fluoro-uridine-3'-phosphate
  modified_base 10: mod_base = OTHER; note = 2'-O-methyl-uridine-3'-phosphate
  modified_base 11: mod_base = OTHER; note = 2'-O-methyl-guanosine-3'-phosphate
  modified_base 12: mod_base = OTHER; note = 2'-O-methyl-adenosine-3'-phosphate
  modified_base 13: mod_base = OTHER; note = 2'-O-methyl-cytidine-3'-phosphate
  modified_base 14: mod_base = OTHER; note = 2'-deoxy-2'-fluoro-cytidine-3'-phosphate
  modified_base 15: mod_base = OTHER; note = 2'-O-methyl-uridine-3'-phosphate
  modified_base 16: mod_base = OTHER; note = 2'-deoxy-2'-fluoro-uridine-3'-phosphate
  modified_base 17: mod_base = OTHER; note = 2'-O-methyl-uridine-3'-phosphate
  modified_base 18: mod_base = OTHER; note = 2'-O-methyl-uridine-3'-phosphate
  modified_base 19: mod_base = OTHER; note = 2'-O-methyl-cytidine-3'-phosphorothioate
  modified_base 20: mod_base = OTHER; note = 2'-O-methyl-uridine-3'-phosphorothioate
  modified_base 21: mod_base = OTHER; note = 2'-O-methyl-uridine-3'-phosphate
tcttaatcttgaccttttctt

SEQ ID NO: 2319 - RNA, 21 nt, synthetic construct
  source 1..21: mol_type = other RNA
  modified_base 1: mod_base = OTHER; note = 2'-O-methyl-uridine-3'-phosphorothioate
  modified_base 2: mod_base = OTHER; note = 2'-deoxy-2'-fluoro-cytidine-3'-phosphorothioate
  modified_base 3: mod_base = OTHER; note = 2'-O-methyl-adenosine-3'-phosphate
  modified_base 4: mod_base = OTHER; note = 2'-O-methyl-uridine-3'-phosphate
  modified_base 5: mod_base = OTHER; note = 2'-O-methyl-guanosine-3'-phosphate
  modified_base 6: mod_base = OTHER; note = 2'-deoxy-2'-fluoro-uridine-3'-phosphate
  modified_base 7: mod_base = OTHER; note = 2'-O-methyl-uridine-3'-phosphate
  modified_base 8: mod_base = OTHER; note = 2'-deoxy-2'-fluoro-uridine-3'-phosphate
  modified_base 9: mod_base = OTHER; note = 2'-deoxy-2'-fluoro-adenosine-3'-phosphate
  modified_base 10: mod_base = OTHER; note = 2'-O-methyl-cytidine-3'-phosphate
  modified_base 11: mod_base = OTHER; note = 2'-O-methyl-adenosine-3'-phosphate
  modified_base 12: mod_base = OTHER; note = 2'-O-methyl-adenosine-3'-phosphate
  modified_base 13: mod_base = OTHER; note = 2'-O-methyl-guanosine-3'-phosphate
  modified_base 14: mod_base = OTHER; note = 2'-deoxy-2'-fluoro-adenosine-3'-phosphate
  modified_base 15: mod_base = OTHER; note = 2'-O-methyl-uridine-3'-phosphate
  modified_base 16: mod_base = OTHER; note = 2'-deoxy-2'-fluoro-cytidine-3'-phosphate
  modified_base 17: mod_base = OTHER; note = 2'-O-methyl-cytidine-3'-phosphate
  modified_base 18: mod_base = OTHER; note = 2'-O-methyl-adenosine-3'-phosphate
  modified_base 19: mod_base = OTHER; note = 2'-O-methyl-adenosine-3'-phosphorothioate
  modified_base 20: mod_base = OTHER; note = 2'-O-methyl-uridine-3'-phosphorothioate
  modified_base 21: mod_base = OTHER; note = 2'-O-methyl-uridine-3'-phosphate
tcatgtttacaagatccaatt

SEQ ID NO: 2320 - RNA, 21 nt, synthetic construct
  source 1..21: mol_type = other RNA
  modified_base 1: mod_base = OTHER; note = 2'-O-methyl-uridine-3'-phosphorothioate
  modified_base 2: mod_base = OTHER; note = 2'-deoxy-2'-fluoro-uridine-3'-phosphorothioate
  modified_base 3: mod_base = OTHER; note = 2'-O-methyl-cytidine-3'-phosphate
  modified_base 4: mod_base = OTHER; note = 2'-O-methyl-adenosine-3'-phosphate
  modified_base 5: mod_base = OTHER; note = 2'-O-methyl-uridine-3'-phosphate
  modified_base 6: mod_base = OTHER; note = 2'-deoxy-2'-fluoro-guanosine-3'-phosphate
  modified_base 7: mod_base = OTHER; note = 2'-O-methyl-uridine-3'-phosphate
  modified_base 8: mod_base = OTHER; note = 2'-deoxy-2'-fluoro-uridine-3'-phosphate
  modified_base 9: mod_base = OTHER; note = 2'-deoxy-2'-fluoro-uridine-3'-phosphate
  modified_base 10: mod_base = OTHER; note = 2'-O-methyl-adenosine-3'-phosphate
  modified_base 11: mod_base = OTHER; note = 2'-O-methyl-cytidine-3'-phosphate
  modified_base 12: mod_base = OTHER; note = 2'-O-methyl-adenosine-3'-phosphate
  modified_base 13: mod_base = OTHER; note = 2'-O-methyl-adenosine-3'-phosphate
  modified_base 14: mod_base = OTHER; note = 2'-deoxy-2'-fluoro-guanosine-3'-phosphate
  modified_base 15: mod_base = OTHER; note = 2'-O-methyl-adenosine-3'-phosphate
  modified_base 16: mod_base = OTHER; note = 2'-deoxy-2'-fluoro-uridine-3'-phosphate
  modified_base 17: mod_base = OTHER; note = 2'-O-methyl-cytidine-3'-phosphate
  modified_base 18: mod_base = OTHER; note = 2'-O-methyl-cytidine-3'-phosphate
  modified_base 19: mod_base = OTHER; note = 2'-O-methyl-adenosine-3'-phosphorothioate
  modified_base 20: mod_base = OTHER; note = 2'-O-methyl-uridine-3'-phosphorothioate
  modified_base 21: mod_base = OTHER; note = 2'-O-methyl-uridine-3'-phosphate
ttcatgtttacaagatccatt

SEQ ID NO: 2321 - RNA, 21 nt, synthetic construct
  source 1..21: mol_type = other RNA
  modified_base 1: mod_base = OTHER; note = 2'-O-methyl-uridine-3'-phosphorothioate
  modified_base 2: mod_base = OTHER; note = 2'-deoxy-2'-fluoro-cytidine-3'-phosphorothioate
  modified_base 3: mod_base = OTHER; note = 2'-O-methyl-uridine-3'-phosphate
  modified_base 4: mod_base = OTHER; note = 2'-O-methyl-uridine-3'-phosphate
  modified_base 5: mod_base = OTHER; note = 2'-O-methyl-uridine-3'-phosphate
  modified_base 6: mod_base = OTHER; note = 2'-deoxy-2'-fluoro-uridine-3'-phosphate
  modified_base 7: mod_base = OTHER; note = 2'-O-methyl-cytidine-3'-phosphate
  modified_base 8: mod_base = OTHER; note = 2'-deoxy-2'-fluoro-adenosine-3'-phosphate
  modified_base 9: mod_base = OTHER; note = 2'-deoxy-2'-fluoro-uridine-3'-phosphate
  modified_base 10: mod_base = OTHER; note = 2'-O-methyl-guanosine-3'-phosphate
  modified_base 11: mod_base = OTHER; note = 2'-O-methyl-uridine-3'-phosphate
  modified_base 12: mod_base = OTHER; note = 2'-O-methyl-uridine-3'-phosphate
  modified_base 13: mod_base = OTHER; note = 2'-O-methyl-uridine-3'-phosphate
  modified_base 14: mod_base = OTHER; note = 2'-deoxy-2'-fluoro-adenosine-3'-phosphate
  modified_base 15: mod_base = OTHER; note = 2'-O-methyl-cytidine-3'-phosphate
  modified_base 16: mod_base = OTHER; note = 2'-deoxy-2'-fluoro-adenosine-3'-phosphate
  modified_base 17: mod_base = OTHER; note = 2'-O-methyl-adenosine-3'-phosphate
  modified_base 18: mod_base = OTHER; note = 2'-O-methyl-guanosine-3'-phosphate
  modified_base 19: mod_base = OTHER; note = 2'-O-methyl-adenosine-3'-phosphorothioate
  modified_base 20: mod_base = OTHER; note = 2'-O-methyl-uridine-3'-phosphorothioate
  modified_base 21: mod_base = OTHER; note = 2'-O-methyl-uridine-3'-phosphate
tcttttcatgtttacaagatt

SEQ ID NO: 2322 - RNA, 21 nt, synthetic construct
  source 1..21: mol_type = other RNA
  modified_base 1: mod_base = OTHER; note = 2'-O-methyl-uridine-3'-phosphorothioate
  modified_base 2: mod_base = OTHER; note = 2'-deoxy-2'-fluoro-cytidine-3'-phosphorothioate
  modified_base 3: mod_base = OTHER; note = 2'-O-methyl-cytidine-3'-phosphate
  modified_base 4: mod_base = OTHER; note = 2'-O-methyl-uridine-3'-phosphate
  modified_base 5: mod_base = OTHER; note = 2'-O-methyl-uridine-3'-phosphate
  modified_base 6: mod_base = OTHER; note = 2'-deoxy-2'-fluoro-uridine-3'-phosphate
  modified_base 7: mod_base = OTHER; note = 2'-O-methyl-uridine-3'-phosphate
  modified_base 8: mod_base = OTHER; note = 2'-deoxy-2'-fluoro-cytidine-3'-phosphate
  modified_base 9: mod_base = OTHER; note = 2'-deoxy-2'-fluoro-adenosine-3'-phosphate
  modified_base 10: mod_base = OTHER; note = 2'-O-methyl-uridine-3'-phosphate
  modified_base 11: mod_base = OTHER; note = 2'-O-methyl-guanosine-3'-phosphate
  modified_base 12: mod_base = OTHER; note = 2'-O-methyl-uridine-3'-phosphate
  modified_base 13: mod_base = OTHER; note = 2'-O-methyl-uridine-3'-phosphate
  modified_base 14: mod_base = OTHER; note = 2'-deoxy-2'-fluoro-uridine-3'-phosphate
  modified_base 15: mod_base = OTHER; note = 2'-O-methyl-adenosine-3'-phosphate
  modified_base 16: mod_base = OTHER; note = 2'-deoxy-2'-fluoro-cytidine-3'-phosphate
  modified_base 17: mod_base = OTHER; note = 2'-O-methyl-adenosine-3'-phosphate
  modified_base 18: mod_base = OTHER; note = 2'-O-methyl-adenosine-3'-phosphate
  modified_base 19: mod_base = OTHER; note = 2'-O-methyl-guanosine-3'-phosphorothioate
  modified_base 20: mod_base = OTHER; note = 2'-O-methyl-uridine-3'-phosphorothioate
  modified_base 21: mod_base = OTHER; note = 2'-O-methyl-uridine-3'-phosphate
tccttttcatgtttacaagtt

SEQ ID NO: 2323 - RNA, 21 nt, synthetic construct
  source 1..21: mol_type = other RNA
  modified_base 1: mod_base = OTHER; note = 2'-O-methyl-uridine-3'-phosphorothioate
  modified_base 2: mod_base = OTHER; note = 2'-deoxy-2'-fluoro-cytidine-3'-phosphorothioate
  modified_base 3: mod_base = OTHER; note = 2'-O-methyl-cytidine-3'-phosphate
  modified_base 4: mod_base = OTHER; note = 2'-O-methyl-cytidine-3'-phosphate
  modified_base 5: mod_base = OTHER; note = 2'-O-methyl-uridine-3'-phosphate
  modified_base 6: mod_base = OTHER; note = 2'-deoxy-2'-fluoro-uridine-3'-phosphate
  modified_base 7: mod_base = OTHER; note = 2'-O-methyl-uridine-3'-phosphate
  modified_base 8: mod_base = OTHER; note = 2'-deoxy-2'-fluoro-uridine-3'-phosphate
  modified_base 9: mod_base = OTHER; note = 2'-deoxy-2'-fluoro-cytidine-3'-phosphate
  modified_base 10: mod_base = OTHER; note = 2'-O-methyl-adenosine-3'-phosphate
  modified_base 11: mod_base = OTHER; note = 2'-O-methyl-uridine-3'-phosphate
  modified_base 12: mod_base = OTHER; note = 2'-O-methyl-guanosine-3'-phosphate
  modified_base 13: mod_base = OTHER; note = 2'-O-methyl-uridine-3'-phosphate
  modified_base 14: mod_base = OTHER; note = 2'-deoxy-2'-fluoro-uridine-3'-phosphate
  modified_base 15: mod_base = OTHER; note = 2'-O-methyl-uridine-3'-phosphate
  modified_base 16: mod_base = OTHER; note = 2'-deoxy-2'-fluoro-adenosine-3'-phosphate
  modified_base 17: mod_base = OTHER; note = 2'-O-methyl-cytidine-3'-phosphate
  modified_base 18: mod_base = OTHER; note = 2'-O-methyl-adenosine-3'-phosphate
  modified_base 19: mod_base = OTHER; note = 2'-O-methyl-adenosine-3'-phosphorothioate
  modified_base 20: mod_base = OTHER; note = 2'-O-methyl-uridine-3'-phosphorothioate
  modified_base 21: mod_base = OTHER; note = 2'-O-methyl-uridine-3'-phosphate
tcccttttcatgtttacaatt

SEQ ID NO: 2324 - RNA, 21 nt, synthetic construct
  source 1..21: mol_type = other RNA
  modified_base 1: mod_base = OTHER; note = 2'-O-methyl-uridine-3'-phosphorothioate
  modified_base 2: mod_base = OTHER; note = 2'-deoxy-2'-fluoro-adenosine-3'-phosphorothioate
  modified_base 3: mod_base = OTHER; note = 2'-O-methyl-adenosine-3'-phosphate
  modified_base 4: mod_base = OTHER; note = 2'-O-methyl-adenosine-3'-phosphate
  modified_base 5: mod_base = OTHER; note = 2'-O-methyl-guanosine-3'-phosphate
  modified_base 6: mod_base = OTHER; note = 2'-deoxy-2'-fluoro-cytidine-3'-phosphate
  modified_base 7: mod_base = OTHER; note = 2'-O-methyl-cytidine-3'-phosphate
  modified_base 8: mod_base = OTHER; note = 2'-deoxy-2'-fluoro-cytidine-3'-phosphate
  modified_base 9: mod_base = OTHER; note = 2'-deoxy-2'-fluoro-uridine-3'-phosphate
  modified_base 10: mod_base = OTHER; note = 2'-O-methyl-uridine-3'-phosphate
  modified_base 11: mod_base = OTHER; note = 2'-O-methyl-uridine-3'-phosphate
  modified_base 12: mod_base = OTHER; note = 2'-O-methyl-uridine-3'-phosphate
  modified_base 13: mod_base = OTHER; note = 2'-O-methyl-cytidine-3'-phosphate
  modified_base 14: mod_base = OTHER; note = 2'-deoxy-2'-fluoro-adenosine-3'-phosphate
  modified_base 15: mod_base = OTHER; note = 2'-O-methyl-uridine-3'-phosphate
  modified_base 16: mod_base = OTHER; note = 2'-deoxy-2'-fluoro-guanosine-3'-phosphate
  modified_base 17: mod_base = OTHER; note = 2'-O-methyl-uridine-3'-phosphate
  modified_base 18: mod_base = OTHER; note = 2'-O-methyl-uridine-3'-phosphate
  modified_base 19: mod_base = OTHER; note = 2'-O-methyl-uridine-3'-phosphorothioate
  modified_base 20: mod_base = OTHER; note = 2'-O-methyl-uridine-3'-phosphorothioate
  modified_base 21: mod_base = OTHER; note = 2'-O-methyl-uridine-3'-phosphate
taaagcccttttcatgttttt

SEQ ID NO: 2325 - RNA, 21 nt, synthetic construct
  source 1..21: mol_type = other RNA
  modified_base 1: mod_base = OTHER; note = 2'-O-methyl-uridine-3'-phosphorothioate
  modified_base 2: mod_base = OTHER; note = 2'-deoxy-2'-fluoro-uridine-3'-phosphorothioate
  modified_base 3: mod_base = OTHER; note = 2'-O-methyl-adenosine-3'-phosphate
  modified_base 4: mod_base = OTHER; note = 2'-O-methyl-adenosine-3'-phosphate
  modified_base 5: mod_base = OTHER; note = 2'-O-methyl-adenosine-3'-phosphate
  modified_base 6: mod_base = OTHER; note = 2'-deoxy-2'-fluoro-guanosine-3'-phosphate
  modified_base 7: mod_base = OTHER; note = 2'-O-methyl-cytidine-3'-phosphate
  modified_base 8: mod_base = OTHER; note = 2'-deoxy-2'-fluoro-cytidine-3'-phosphate
  modified_base 9: mod_base = OTHER; note = 2'-deoxy-2'-fluoro-cytidine-3'-phosphate
  modified_base 10: mod_base = OTHER; note = 2'-O-methyl-uridine-3'-phosphate
  modified_base 11: mod_base = OTHER; note = 2'-O-methyl-uridine-3'-phosphate
  modified_base 12: mod_base = OTHER; note = 2'-O-methyl-uridine-3'-phosphate
  modified_base 13: mod_base = OTHER; note = 2'-O-methyl-uridine-3'-phosphate
  modified_base 14: mod_base = OTHER; note = 2'-deoxy-2'-fluoro-cytidine-3'-phosphate
  modified_base 15: mod_base = OTHER; note = 2'-O-methyl-adenosine-3'-phosphate
  modified_base 16: mod_base = OTHER; note = 2'-deoxy-2'-fluoro-uridine-3'-phosphate
  modified_base 17: mod_base = OTHER; note = 2'-O-methyl-guanosine-3'-phosphate
  modified_base 18: mod_base = OTHER; note = 2'-O-methyl-uridine-3'-phosphate
  modified_base 19: mod_base = OTHER; note = 2'-O-methyl-uridine-3'-phosphorothioate
  modified_base 20: mod_base = OTHER; note = 2'-O-methyl-uridine-3'-phosphorothioate
  modified_base 21: mod_base = OTHER; note = 2'-O-methyl-uridine-3'-phosphate
ttaaagcccttttcatgtttt

SEQ ID NO: 2326 - RNA, 21 nt, synthetic construct
  source 1..21: mol_type = other RNA
  modified_base 1: mod_base = OTHER; note = 2'-O-methyl-uridine-3'-phosphorothioate
  modified_base 2: mod_base = OTHER; note = 2'-deoxy-2'-fluoro-adenosine-3'-phosphorothioate
  modified_base 3: mod_base = OTHER; note = 2'-O-methyl-guanosine-3'-phosphate
  modified_base 4: mod_base = OTHER; note = 2'-O-methyl-adenosine-3'-phosphate
  modified_base 5: mod_base = OTHER; note = 2'-O-methyl-adenosine-3'-phosphate
  modified_base 6: mod_base = OTHER; note = 2'-deoxy-2'-fluoro-adenosine-3'-phosphate
  modified_base 7: mod_base = OTHER; note = 2'-O-methyl-adenosine-3'-phosphate
  modified_base 8: mod_base = OTHER; note = 2'-deoxy-2'-fluoro-guanosine-3'-phosphate
  modified_base 9: mod_base = OTHER; note = 2'-deoxy-2'-fluoro-adenosine-3'-phosphate
  modified_base 10: mod_base = OTHER; note = 2'-O-methyl-uridine-3'-phosphate
  modified_base 11: mod_base = OTHER; note = 2'-O-methyl-uridine-3'-phosphate
  modified_base 12: mod_base = OTHER; note = 2'-O-methyl-uridine-3'-phosphate
  modified_base 13: mod_base = OTHER; note = 2'-O-methyl-guanosine-3'-phosphate
  modified_base 14: mod_base = OTHER; note = 2'-deoxy-2'-fluoro-guanosine-3'-phosphate
  modified_base 15: mod_base = OTHER; note = 2'-O-methyl-guanosine-3'-phosphate
  modified_base 16: mod_base = OTHER; note = 2'-deoxy-2'-fluoro-adenosine-3'-phosphate
  modified_base 17: mod_base = OTHER; note = 2'-O-methyl-uridine-3'-phosphate
  modified_base 18: mod_base = OTHER; note = 2'-O-methyl-adenosine-3'-phosphate
  modified_base 19: mod_base = OTHER; note = 2'-O-methyl-guanosine-3'-phosphorothioate
  modified_base 20: mod_base = OTHER; note = 2'-O-methyl-uridine-3'-phosphorothioate
  modified_base 21: mod_base = OTHER; note = 2'-O-methyl-uridine-3'-phosphate
tagaaaagatttgggatagtt

SEQ ID NO: 2327 - RNA, 21 nt, synthetic construct
  source 1..21: mol_type = other RNA
  modified_base 1: mod_base = OTHER; note = 2'-O-methyl-uridine-3'-phosphorothioate
  modified_base 2: mod_base = OTHER; note = 2'-deoxy-2'-fluoro-uridine-3'-phosphorothioate
  modified_base 3: mod_base = OTHER; note = 2'-O-methyl-cytidine-3'-phosphate
  modified_base 4: mod_base = OTHER; note = 2'-O-methyl-adenosine-3'-phosphate
  modified_base 5: mod_base = OTHER; note = 2'-O-methyl-guanosine-3'-phosphate
  modified_base 6: mod_base = OTHER; note = 2'-deoxy-2'-fluoro-adenosine-3'-phosphate
  modified_base 7: mod_base = OTHER; note = 2'-O-methyl-adenosine-3'-phosphate
  modified_base 8: mod_base = OTHER; note = 2'-deoxy-2'-fluoro-adenosine-3'-phosphate
  modified_base 9: mod_base = OTHER; note = 2'-deoxy-2'-fluoro-adenosine-3'-phosphate
  modified_base 10: mod_base = OTHER; note = 2'-O-methyl-guanosine-3'-phosphate
  modified_base 11: mod_base = OTHER; note = 2'-O-methyl-adenosine-3'-phosphate
  modified_base 12: mod_base = OTHER; note = 2'-O-methyl-uridine-3'-phosphate
  modified_base 13: mod_base = OTHER; note = 2'-O-methyl-uridine-3'-phosphate
  modified_base 14: mod_base = OTHER; note = 2'-deoxy-2'-fluoro-uridine-3'-phosphate
  modified_base 15: mod_base = OTHER; note = 2'-O-methyl-guanosine-3'-phosphate
  modified_base 16: mod_base = OTHER; note = 2'-deoxy-2'-fluoro-guanosine-3'-phosphate
  modified_base 17: mod_base = OTHER; note = 2'-O-methyl-guanosine-3'-phosphate
  modified_base 18: mod_base = OTHER; note = 2'-O-methyl-adenosine-3'-phosphate
  modified_base 19: mod_base = OTHER; note = 2'-O-methyl-uridine-3'-phosphorothioate
  modified_base 20: mod_base = OTHER; note = 2'-O-methyl-uridine-3'-phosphorothioate
  modified_base 21: mod_base = OTHER; note = 2'-O-methyl-uridine-3'-phosphate
ttcagaaaagatttgggattt

SEQ ID NO: 2328 - RNA, 21 nt, synthetic construct
  source 1..21: mol_type = other RNA
  modified_base 1: mod_base = OTHER; note = 2'-O-methyl-uridine-3'-phosphorothioate
  modified_base 2: mod_base = OTHER; note = 2'-deoxy-2'-fluoro-uridine-3'-phosphorothioate
  modified_base 3: mod_base = OTHER; note = 2'-O-methyl-uridine-3'-phosphate
  modified_base 4: mod_base = OTHER; note = 2'-O-methyl-cytidine-3'-phosphate
  modified_base 5: mod_base = OTHER; note = 2'-O-methyl-adenosine-3'-phosphate
  modified_base 6: mod_base = OTHER; note = 2'-deoxy-2'-fluoro-guanosine-3'-phosphate
  modified_base 7: mod_base = OTHER; note = 2'-O-methyl-adenosine-3'-phosphate
  modified_base 8: mod_base = OTHER; note = 2'-deoxy-2'-fluoro-adenosine-3'-phosphate
  modified_base 9: mod_base = OTHER; note = 2'-deoxy-2'-fluoro-adenosine-3'-phosphate
  modified_base 10: mod_base = OTHER; note = 2'-O-methyl-adenosine-3'-phosphate
  modified_base 11: mod_base = OTHER; note = 2'-O-methyl-guanosine-3'-phosphate
  modified_base 12: mod_base = OTHER; note = 2'-O-methyl-adenosine-3'-phosphate
  modified_base 13: mod_base = OTHER; note = 2'-O-methyl-uridine-3'-phosphate
  modified_base 14: mod_base = OTHER; note = 2'-deoxy-2'-fluoro-uridine-3'-phosphate
  modified_base 15: mod_base = OTHER; note = 2'-O-methyl-uridine-3'-phosphate
  modified_base 16: mod_base = OTHER; note = 2'-deoxy-2'-fluoro-guanosine-3'-phosphate
  modified_base 17: mod_base = OTHER; note = 2'-O-methyl-guanosine-3'-phosphate
  modified_base 18: mod_base = OTHER; note = 2'-O-methyl-guanosine-3'-phosphate
  modified_base 19: mod_base = OTHER; note = 2'-O-methyl-adenosine-3'-phosphorothioate
  modified_base 20: mod_base = OTHER; note = 2'-O-methyl-uridine-3'-phosphorothioate
  modified_base 21: mod_base = OTHER; note = 2'-O-methyl-uridine-3'-phosphate
tttcagaaaagatttgggatt

SEQ ID NO: 2329 - RNA, 21 nt, synthetic construct
  source 1..21: mol_type = other RNA
  modified_base 1: mod_base = OTHER; note = 2'-O-methyl-uridine-3'-phosphorothioate
  modified_base 2: mod_base = OTHER; note = 2'-deoxy-2'-fluoro-uridine-3'-phosphorothioate
  modified_base 3: mod_base = OTHER; note = 2'-O-methyl-cytidine-3'-phosphate
  modified_base 4: mod_base = OTHER; note = 2'-O-methyl-uridine-3'-phosphate
  modified_base 5: mod_base = OTHER; note = 2'-O-methyl-uridine-3'-phosphate
  modified_base 6: mod_base = OTHER; note = 2'-deoxy-2'-fluoro-cytidine-3'-phosphate
  modified_base 7: mod_base = OTHER; note = 2'-O-methyl-adenosine-3'-phosphate
  modified_base 8: mod_base = OTHER; note = 2'-deoxy-2'-fluoro-uridine-3'-phosphate
  modified_base 9: mod_base = OTHER; note = 2'-deoxy-2'-fluoro-cytidine-3'-phosphate
  modified_base 10: mod_base = OTHER; note = 2'-O-methyl-uridine-3'-phosphate
  modified_base 11: mod_base = OTHER; note = 2'-O-methyl-uridine-3'-phosphate
  modified_base 12: mod_base = OTHER; note = 2'-O-methyl-cytidine-3'-phosphate
  modified_base 13: mod_base = OTHER; note = 2'-O-methyl-adenosine-3'-phosphate
  modified_base 14: mod_base = OTHER; note = 2'-deoxy-2'-fluoro-guanosine-3'-phosphate
  modified_base 15: mod_base = OTHER; note = 2'-O-methyl-adenosine-3'-phosphate
  modified_base 16: mod_base = OTHER; note = 2'-deoxy-2'-fluoro-adenosine-3'-phosphate
  modified_base 17: mod_base = OTHER; note = 2'-O-methyl-adenosine-3'-phosphate
  modified_base 18: mod_base = OTHER; note = 2'-O-methyl-adenosine-3'-phosphate
  modified_base 19: mod_base = OTHER; note = 2'-O-methyl-guanosine-3'-phosphorothioate
  modified_base 20: mod_base = OTHER; note = 2'-O-methyl-uridine-3'-phosphorothioate
  modified_base 21: mod_base = OTHER; note = 2'-O-methyl-uridine-3'-phosphate
ttcttcatcttcagaaaagtt

SEQ ID NO: 2330 - RNA, 21 nt, synthetic construct
  source 1..21: mol_type = other RNA
  modified_base 1: mod_base = OTHER; note = 2'-O-methyl-uridine-3'-phosphorothioate
  modified_base 2: mod_base = OTHER; note = 2'-deoxy-2'-fluoro-cytidine-3'-phosphorothioate
  modified_base 3: mod_base = OTHER; note = 2'-O-methyl-uridine-3'-phosphate
  modified_base 4: mod_base = OTHER; note = 2'-O-methyl-cytidine-3'-phosphate
  modified_base 5: mod_base = OTHER; note = 2'-O-methyl-uridine-3'-phosphate
  modified_base 6: mod_base = OTHER; note = 2'-deoxy-2'-fluoro-uridine-3'-phosphate
  modified_base 7: mod_base = OTHER; note = 2'-O-methyl-cytidine-3'-phosphate
  modified_base 8: mod_base = OTHER; note = 2'-deoxy-2'-fluoro-adenosine-3'-phosphate
  modified_base 9: mod_base = OTHER; note = 2'-deoxy-2'-fluoro-uridine-3'-phosphate
  modified_base 10: mod_base = OTHER; note = 2'-O-methyl-cytidine-3'-phosphate
  modified_base 11: mod_base = OTHER; note = 2'-O-methyl-uridine-3'-phosphate
  modified_base 12: mod_base = OTHER; note = 2'-O-methyl-uridine-3'-phosphate
  modified_base 13: mod_base = OTHER; note = 2'-O-methyl-cytidine-3'-phosphate
  modified_base 14: mod_base = OTHER; note = 2'-deoxy-2'-fluoro-adenosine-3'-phosphate
  modified_base 15: mod_base = OTHER; note = 2'-O-methyl-guanosine-3'-phosphate
  modified_base 16: mod_base = OTHER; note = 2'-deoxy-2'-fluoro-adenosine-3'-phosphate
  modified_base 17: mod_base = OTHER; note = 2'-O-methyl-adenosine-3'-phosphate
  modified_base 18: mod_base = OTHER; note = 2'-O-methyl-adenosine-3'-phosphate
  modified_base 19: mod_base = OTHER; note = 2'-O-methyl-adenosine-3'-phosphorothioate
  modified_base 20: mod_base = OTHER; note = 2'-O-methyl-uridine-3'-phosphorothioate
  modified_base 21: mod_base = OTHER; note = 2'-O-methyl-uridine-3'-phosphate
tctcttcatcttcagaaaatt

SEQ ID NO: 2331 - RNA, 21 nt, synthetic construct
  source 1..21: mol_type = other RNA
  modified_base 1: mod_base = OTHER; note = 2'-O-methyl-uridine-3'-phosphorothioate
  modified_base 2: mod_base = OTHER; note = 2'-deoxy-2'-fluoro-adenosine-3'-phosphorothioate
  modified_base 3: mod_base = OTHER; note = 2'-O-methyl-cytidine-3'-phosphate
  modified_base 4: mod_base = OTHER; note = 2'-O-methyl-uridine-3'-phosphate
  modified_base 5: mod_base = OTHER; note = 2'-O-methyl-cytidine-3'-phosphate
  modified_base 6: mod_base = OTHER; note = 2'-deoxy-2'-fluoro-uridine-3'-phosphate
  modified_base 7: mod_base = OTHER; note = 2'-O-methyl-uridine-3'-phosphate
  modified_base 8: mod_base = OTHER; note = 2'-deoxy-2'-fluoro-cytidine-3'-phosphate
  modified_base 9: mod_base = OTHER; note = 2'-deoxy-2'-fluoro-adenosine-3'-phosphate
  modified_base 10: mod_base = OTHER; note = 2'-O-methyl-uridine-3'-phosphate
  modified_base 11: mod_base = OTHER; note = 2'-O-methyl-cytidine-3'-phosphate
  modified_base 12: mod_base = OTHER; note = 2'-O-methyl-uridine-3'-phosphate
  modified_base 13: mod_base = OTHER; note = 2'-O-methyl-uridine-3'-phosphate
  modified_base 14: mod_base = OTHER; note = 2'-deoxy-2'-fluoro-cytidine-3'-phosphate
  modified_base 15: mod_base = OTHER; note = 2'-O-methyl-adenosine-3'-phosphate
  modified_base 16: mod_base = OTHER; note = 2'-deoxy-2'-fluoro-guanosine-3'-phosphate
  modified_base 17: mod_base = OTHER; note = 2'-O-methyl-adenosine-3'-phosphate
  modified_base 18: mod_base = OTHER; note = 2'-O-methyl-adenosine-3'-phosphate
  modified_base 19: mod_base = OTHER; note = 2'-O-methyl-adenosine-3'-phosphorothioate
  modified_base 20: mod_base = OTHER; note = 2'-O-methyl-uridine-3'-phosphorothioate
  modified_base 21: mod_base = OTHER; note = 2'-O-methyl-uridine-3'-phosphate
tactcttcatcttcagaaatt

SEQ ID NO: 2332 - RNA, 21 nt, synthetic construct
  source 1..21: mol_type = other RNA
  modified_base 1: mod_base = OTHER; note = 2'-O-methyl-uridine-3'-phosphorothioate
  modified_base 2: mod_base = OTHER; note = 2'-deoxy-2'-fluoro-adenosine-3'-phosphorothioate
  modified_base 3: mod_base = OTHER; note = 2'-O-methyl-adenosine-3'-phosphate
  modified_base 4: mod_base = OTHER; note = 2'-O-methyl-cytidine-3'-phosphate
  modified_base 5: mod_base = OTHER; note = 2'-O-methyl-uridine-3'-phosphate
  modified_base 6: mod_base = OTHER; note = 2'-deoxy-2'-fluoro-cytidine-3'-phosphate
  modified_base 7: mod_base = OTHER; note = 2'-O-methyl-uridine-3'-phosphate
  modified_base 8: mod_base = OTHER; note = 2'-deoxy-2'-fluoro-uridine-3'-phosphate
  modified_base 9: mod_base = OTHER; note = 2'-deoxy-2'-fluoro-cytidine-3'-phosphate
  modified_base 10: mod_base = OTHER; note = 2'-O-methyl-adenosine-3'-phosphate
  modified_base 11: mod_base = OTHER; note = 2'-O-methyl-uridine-3'-phosphate
  modified_base 12: mod_base = OTHER; note = 2'-O-methyl-cytidine-3'-phosphate
  modified_base 13: mod_base = OTHER; note = 2'-O-methyl-uridine-3'-phosphate
  modified_base 14: mod_base = OTHER; note = 2'-deoxy-2'-fluoro-uridine-3'-phosphate
  modified_base 15: mod_base = OTHER; note = 2'-O-methyl-cytidine-3'-phosphate
  modified_base 16: mod_base = OTHER; note = 2'-deoxy-2'-fluoro-adenosine-3'-phosphate
  modified_base 17: mod_base = OTHER; note = 2'-O-methyl-guanosine-3'-phosphate
  modified_base 18: mod_base = OTHER; note = 2'-O-methyl-adenosine-3'-phosphate
  modified_base 19: mod_base = OTHER; note = 2'-O-methyl-adenosine-3'-phosphorothioate
  modified_base 20: mod_base = OTHER; note = 2'-O-methyl-uridine-3'-phosphorothioate
  modified_base 21: mod_base = OTHER; note = 2'-O-methyl-uridine-3'-phosphate
taactcttcatcttcagaatt

SEQ ID NO: 2333 - RNA, 21 nt, synthetic construct
  source 1..21: mol_type = other RNA
  modified_base 1: mod_base = OTHER; note = 2'-O-methyl-uridine-3'-phosphorothioate
  modified_base 2: mod_base = OTHER; note = 2'-deoxy-2'-fluoro-adenosine-3'-phosphorothioate
  modified_base 3: mod_base = OTHER; note = 2'-O-methyl-adenosine-3'-phosphate
  modified_base 4: mod_base = OTHER; note = 2'-O-methyl-adenosine-3'-phosphate
  modified_base 5: mod_base = OTHER; note = 2'-O-methyl-cytidine-3'-phosphate
  modified_base 6: mod_base = OTHER; note = 2'-deoxy-2'-fluoro-uridine-3'-phosphate
  modified_base 7: mod_base = OTHER; note = 2'-O-methyl-cytidine-3'-phosphate
  modified_base 8: mod_base = OTHER; note = 2'-deoxy-2'-fluoro-uridine-3'-phosphate
  modified_base 9: mod_base = OTHER; note = 2'-deoxy-2'-fluoro-uridine-3'-phosphate
  modified_base 10: mod_base = OTHER; note = 2'-O-methyl-cytidine-3'-phosphate
  modified_base 11: mod_base = OTHER; note = 2'-O-methyl-adenosine-3'-phosphate
  modified_base 12: mod_base = OTHER; note = 2'-O-methyl-uridine-3'-phosphate
  modified_base 13: mod_base = OTHER; note = 2'-O-methyl-cytidine-3'-phosphate
  modified_base 14: mod_base = OTHER; note = 2'-deoxy-2'-fluoro-uridine-3'-phosphate
  modified_base 15: mod_base = OTHER; note = 2'-O-methyl-uridine-3'-phosphate
  modified_base 16: mod_base = OTHER; note = 2'-deoxy-2'-fluoro-cytidine-3'-phosphate
  modified_base 17: mod_base = OTHER; note = 2'-O-methyl-adenosine-3'-phosphate
  modified_base 18: mod_base = OTHER; note = 2'-O-methyl-guanosine-3'-phosphate
  modified_base 19: mod_base = OTHER; note = 2'-O-methyl-adenosine-3'-phosphorothioate
  modified_base 20: mod_base = OTHER; note = 2'-O-methyl-uridine-3'-phosphorothioate
  modified_base 21: mod_base = OTHER; note = 2'-O-methyl-uridine-3'-phosphate
taaactcttcatcttcagatt

SEQ ID NO: 2334 - RNA, 21 nt, synthetic construct
  source 1..21: mol_type = other RNA
  modified_base 1: mod_base = OTHER; note = 2'-O-methyl-uridine-3'-phosphorothioate
  modified_base 2: mod_base = OTHER; note = 2'-deoxy-2'-fluoro-uridine-3'-phosphorothioate
  modified_base 3: mod_base = OTHER; note = 2'-O-methyl-adenosine-3'-phosphate
  modified_base 4: mod_base = OTHER; note = 2'-O-methyl-adenosine-3'-phosphate
  modified_base 5: mod_base = OTHER; note = 2'-O-methyl-adenosine-3'-phosphate
  modified_base 6: mod_base = OTHER; note = 2'-deoxy-2'-fluoro-cytidine-3'-phosphate
  modified_base 7: mod_base = OTHER; note = 2'-O-methyl-uridine-3'-phosphate
  modified_base 8: mod_base = OTHER; note = 2'-deoxy-2'-fluoro-cytidine-3'-phosphate
  modified_base 9: mod_base = OTHER; note = 2'-deoxy-2'-fluoro-uridine-3'-phosphate
  modified_base 10: mod_base = OTHER; note = 2'-O-methyl-uridine-3'-phosphate
  modified_base 11: mod_base = OTHER; note = 2'-O-methyl-cytidine-3'-phosphate
  modified_base 12: mod_base = OTHER; note = 2'-O-methyl-adenosine-3'-phosphate
  modified_base 13: mod_base = OTHER; note = 2'-O-methyl-uridine-3'-phosphate
  modified_base 14: mod_base = OTHER; note = 2'-deoxy-2'-fluoro-cytidine-3'-phosphate
  modified_base 15: mod_base = OTHER; note = 2'-O-methyl-uridine-3'-phosphate
  modified_base 16: mod_base = OTHER; note = 2'-deoxy-2'-fluoro-uridine-3'-phosphate
  modified_base 17: mod_base = OTHER; note = 2'-O-methyl-cytidine-3'-phosphate
  modified_base 18: mod_base = OTHER; note = 2'-O-methyl-adenosine-3'-phosphate
  modified_base 19: mod_base = OTHER; note = 2'-O-methyl-guanosine-3'-phosphorothioate
  modified_base 20: mod_base = OTHER; note = 2'-O-methyl-uridine-3'-phosphorothioate
  modified_base 21: mod_base = OTHER; note = 2'-O-methyl-uridine-3'-phosphate
ttaaactcttcatcttcagtt

SEQ ID NO: 2335 - RNA, 21 nt, synthetic construct
  source 1..21: mol_type = other RNA
  modified_base 1: mod_base = OTHER; note = 2'-O-methyl-uridine-3'-phosphorothioate
  modified_base 2: mod_base = OTHER; note = 2'-deoxy-2'-fluoro-cytidine-3'-phosphorothioate
  modified_base 3: mod_base = OTHER; note = 2'-O-methyl-uridine-3'-phosphate
  modified_base 4: mod_base = OTHER; note = 2'-O-methyl-adenosine-3'-phosphate
  modified_base 5: mod_base = OTHER; note = 2'-O-methyl-adenosine-3'-phosphate
  modified_base 6: mod_base = OTHER; note = 2'-deoxy-2'-fluoro-adenosine-3'-phosphate
  modified_base 7: mod_base = OTHER; note = 2'-O-methyl-cytidine-3'-phosphate
  modified_base 8: mod_base = OTHER; note = 2'-deoxy-2'-fluoro-uridine-3'-phosphate
  modified_base 9: mod_base = OTHER; note = 2'-deoxy-2'-fluoro-cytidine-3'-phosphate
  modified_base 10: mod_base = OTHER; note = 2'-O-methyl-uridine-3'-phosphate
  modified_base 11: mod_base = OTHER; note = 2'-O-methyl-uridine-3'-phosphate
  modified_base 12: mod_base = OTHER; note = 2'-O-methyl-cytidine-3'-phosphate
  modified_base 13: mod_base = OTHER; note = 2'-O-methyl-adenosine-3'-phosphate
  modified_base 14: mod_base = OTHER; note = 2'-deoxy-2'-fluoro-uridine-3'-phosphate
  modified_base 15: mod_base = OTHER; note = 2'-O-methyl-cytidine-3'-phosphate
  modified_base 16: mod_base = OTHER; note = 2'-deoxy-2'-fluoro-uridine-3'-phosphate
  modified_base 17: mod_base = OTHER; note = 2'-O-methyl-uridine-3'-phosphate
  modified_base 18: mod_base = OTHER; note = 2'-O-methyl-cytidine-3'-phosphate
  modified_base 19: mod_base = OTHER; note = 2'-O-methyl-adenosine-3'-phosphorothioate
  modified_base 20: mod_base = OTHER; note = 2'-O-methyl-uridine-3'-phosphorothioate
  modified_base 21: mod_base = OTHER; note = 2'-O-methyl-uridine-3'-phosphate
tctaaactcttcatcttcatt

SEQ ID NO: 2336 - RNA, 21 nt, synthetic construct
  source 1..21: mol_type = other RNA
  modified_base 1: mod_base = OTHER; note = 2'-O-methyl-uridine-3'-phosphorothioate
  modified_base 2: mod_base = OTHER; note = 2'-deoxy-2'-fluoro-adenosine-3'-phosphorothioate
  modified_base 3: mod_base = OTHER; note = 2'-O-methyl-cytidine-3'-phosphate
  modified_base 4: mod_base = OTHER; note = 2'-O-methyl-uridine-3'-phosphate
  modified_base 5: mod_base = OTHER; note = 2'-O-methyl-adenosine-3'-phosphate
  modified_base 6: mod_base = OTHER; note = 2'-deoxy-2'-fluoro-adenosine-3'-phosphate
  modified_base 7: mod_base = OTHER; note = 2'-O-methyl-adenosine-3'-phosphate
  modified_base 8: mod_base = OTHER; note = 2'-deoxy-2'-fluoro-cytidine-3'-phosphate
  modified_base 9: mod_base = OTHER; note = 2'-deoxy-2'-fluoro-uridine-3'-phosphate
  modified_base 10: mod_base = OTHER; note = 2'-O-methyl-cytidine-3'-phosphate
  modified_base 11: mod_base = OTHER; note = 2'-O-methyl-uridine-3'-phosphate
  modified_base 12: mod_base = OTHER; note = 2'-O-methyl-uridine-3'-phosphate
  modified_base 13: mod_base = OTHER; note = 2'-O-methyl-cytidine-3'-phosphate
  modified_base 14: mod_base = OTHER; note = 2'-deoxy-2'-fluoro-adenosine-3'-phosphate
  modified_base 15: mod_base = OTHER; note = 2'-O-methyl-uridine-3'-phosphate
  modified_base 16: mod_base = OTHER; note = 2'-deoxy-2'-fluoro-cytidine-3'-phosphate
  modified_base 17: mod_base = OTHER; note = 2'-O-methyl-uridine-3'-phosphate
  modified_base 18: mod_base = OTHER; note = 2'-O-methyl-uridine-3'-phosphate
  modified_base 19: mod_base = OTHER; note = 2'-O-methyl-cytidine-3'-phosphorothioate
  modified_base 20: mod_base = OTHER; note = 2'-O-methyl-uridine-3'-phosphorothioate
  modified_base 21: mod_base = OTHER; note = 2'-O-methyl-uridine-3'-phosphate
tactaaactcttcatcttctt

SEQ ID NO: 2337 - RNA, 21 nt, synthetic construct
  source 1..21: mol_type = other RNA
  modified_base 1: mod_base = OTHER; note = 2'-O-methyl-uridine-3'-phosphorothioate
  modified_base 2: mod_base = OTHER; note = 2'-deoxy-2'-fluoro-adenosine-3'-phosphorothioate
  modified_base 3: mod_base = OTHER; note = 2'-O-methyl-cytidine-3'-phosphate
  modified_base 4: mod_base = OTHER; note = 2'-O-methyl-uridine-3'-phosphate
  modified_base 5: mod_base = OTHER; note = 2'-O-methyl-uridine-3'-phosphate
  modified_base 6: mod_base = OTHER; note = 2'-deoxy-2'-fluoro-guanosine-3'-phosphate
  modified_base 7: mod_base = OTHER; note = 2'-O-methyl-uridine-3'-phosphate
  modified_base 8: mod_base = OTHER; note = 2'-deoxy-2'-fluoro-uridine-3'-phosphate
  modified_base 9: mod_base = OTHER; note = 2'-deoxy-2'-fluoro-guanosine-3'-phosphate
  modified_base 10: mod_base = OTHER; note = 2'-O-methyl-guanosine-3'-phosphate
  modified_base 11: mod_base = OTHER; note = 2'-O-methyl-cytidine-3'-phosphate
  modified_base 12: mod_base = OTHER; note = 2'-O-methyl-adenosine-3'-phosphate
  modified_base 13: mod_base = OTHER; note = 2'-O-methyl-guanosine-3'-phosphate
  modified_base 14: mod_base = OTHER; note = 2'-deoxy-2'-fluoro-uridine-3'-phosphate
  modified_base 15: mod_base = OTHER; note = 2'-O-methyl-guanosine-3'-phosphate
  modified_base 16: mod_base = OTHER; note = 2'-deoxy-2'-fluoro-cytidine-3'-phosphate
  modified_base 17: mod_base = OTHER; note = 2'-O-methyl-adenosine-3'-phosphate
  modified_base 18: mod_base = OTHER; note = 2'-O-methyl-guanosine-3'-phosphate
  modified_base 19: mod_base = OTHER; note = 2'-O-methyl-uridine-3'-phosphorothioate
  modified_base 20: mod_base = OTHER; note = 2'-O-methyl-uridine-3'-phosphorothioate
  modified_base 21: mod_base = OTHER; note = 2'-O-methyl-uridine-3'-phosphate
tacttgttggcagtgcagttt

SEQ ID NO: 2338 - RNA, 21 nt, synthetic construct
  source 1..21: mol_type = other RNA
  modified_base 1: mod_base = OTHER; note = 2'-O-methyl-uridine-3'-phosphorothioate
  modified_base 2: mod_base = OTHER; note = 2'-deoxy-2'-fluoro-uridine-3'-phosphorothioate
  modified_base 3: mod_base = OTHER; note = 2'-O-methyl-guanosine-3'-phosphate
  modified_base 4: mod_base = OTHER; note = 2'-O-methyl-adenosine-3'-phosphate
  modified_base 5: mod_base = OTHER; note = 2'-O-methyl-adenosine-3'-phosphate
  modified_base 6: mod_base = OTHER; note = 2'-deoxy-2'-fluoro-cytidine-3'-phosphate
  modified_base 7: mod_base = OTHER; note = 2'-O-methyl-uridine-3'-phosphate
  modified_base 8: mod_base = OTHER; note = 2'-deoxy-2'-fluoro-uridine-3'-phosphate
  modified_base 9: mod_base = OTHER; note = 2'-deoxy-2'-fluoro-guanosine-3'-phosphate
  modified_base 10: mod_base = OTHER; note = 2'-O-methyl-uridine-3'-phosphate
  modified_base 11: mod_base = OTHER; note = 2'-O-methyl-uridine-3'-phosphate
  modified_base 12: mod_base = OTHER; note = 2'-O-methyl-guanosine-3'-phosphate
  modified_base 13: mod_base = OTHER; note = 2'-O-methyl-guanosine-3'-phosphate
  modified_base 14: mod_base = OTHER; note = 2'-deoxy-2'-fluoro-cytidine-3'-phosphate
  modified_base 15: mod_base = OTHER; note = 2'-O-methyl-adenosine-3'-phosphate
  modified_base 16: mod_base = OTHER; note = 2'-deoxy-2'-fluoro-guanosine-3'-phosphate
  modified_base 17: mod_base = OTHER; note = 2'-O-methyl-uridine-3'-phosphate
  modified_base 18: mod_base = OTHER; note = 2'-O-methyl-guanosine-3'-phosphate
  modified_base 19: mod_base = OTHER; note = 2'-O-methyl-cytidine-3'-phosphorothioate
  modified_base 20: mod_base = OTHER; note = 2'-O-methyl-uridine-3'-phosphorothioate
  modified_base 21: mod_base = OTHER; note = 2'-O-methyl-uridine-3'-phosphate
ttgaacttgttggcagtgctt

SEQ ID NO: 2339 - RNA, 21 nt, synthetic construct
  source 1..21: mol_type = other RNA
  modified_base 1: mod_base = OTHER; note = 2'-O-methyl-uridine-3'-phosphorothioate
  modified_base 2: mod_base = OTHER; note = 2'-deoxy-2'-fluoro-guanosine-3'-phosphorothioate
  modified_base 3: mod_base = OTHER; note = 2'-O-methyl-adenosine-3'-phosphate
  modified_base 4: mod_base = OTHER; note = 2'-O-methyl-adenosine-3'-phosphate
  modified_base 5: mod_base = OTHER; note = 2'-O-methyl-guanosine-3'-phosphate
  modified_base 6: mod_base = OTHER; note = 2'-deoxy-2'-fluoro-uridine-3'-phosphate
  modified_base 7: mod_base = OTHER; note = 2'-O-methyl-guanosine-3'-phosphate
  modified_base 8: mod_base = OTHER; note = 2'-deoxy-2'-fluoro-adenosine-3'-phosphate
  modified_base 9: mod_base = OTHER; note = 2'-deoxy-2'-fluoro-adenosine-3'-phosphate
  modified_base 10: mod_base = OTHER; note = 2'-O-methyl-cytidine-3'-phosphate
  modified_base 11: mod_base = OTHER; note = 2'-O-methyl-uridine-3'-phosphate
  modified_base 12: mod_base = OTHER; note = 2'-O-methyl-uridine-3'-phosphate
  modified_base 13: mod_base = OTHER; note = 2'-O-methyl-guanosine-3'-phosphate
  modified_base 14: mod_base = OTHER; note = 2'-deoxy-2'-fluoro-uridine-3'-phosphate
  modified_base 15: mod_base = OTHER; note = 2'-O-methyl-uridine-3'-phosphate
  modified_base 16: mod_base = OTHER; note = 2'-deoxy-2'-fluoro-guanosine-3'-phosphate
  modified_base 17: mod_base = OTHER; note = 2'-O-methyl-guanosine-3'-phosphate
  modified_base 18: mod_base = OTHER; note = 2'-O-methyl-cytidine-3'-phosphate
  modified_base 19: mod_base = OTHER; note = 2'-O-methyl-adenosine-3'-phosphorothioate
  modified_base 20: mod_base = OTHER; note = 2'-O-methyl-uridine-3'-phosphorothioate
  modified_base 21: mod_base = OTHER; note = 2'-O-methyl-uridine-3'-phosphate
tgaagtgaacttgttggcatt

SEQ ID NO: 2340 - RNA, 21 nt, synthetic construct
  source 1..21: mol_type = other RNA
  modified_base 1: mod_base = OTHER; note = 2'-O-methyl-uridine-3'-phosphorothioate
  modified_base 2: mod_base = OTHER; note = 2'-deoxy-2'-fluoro-cytidine-3'-phosphorothioate
  modified_base 3: mod_base = OTHER; note = 2'-O-methyl-uridine-3'-phosphate
  modified_base 4: mod_base = OTHER; note = 2'-O-methyl-uridine-3'-phosphate
  modified_base 5: mod_base = OTHER; note = 2'-O-methyl-uridine-3'-phosphate
  modified_base 6: mod_base = OTHER; note = 2'-deoxy-2'-fluoro-adenosine-3'-phosphate
  modified_base 7: mod_base = OTHER; note = 2'-O-methyl-uridine-3'-phosphate
  modified_base 8: mod_base = OTHER; note = 2'-deoxy-2'-fluoro-adenosine-3'-phosphate
  modified_base 9: mod_base = OTHER; note = 2'-deoxy-2'-fluoro-uridine-3'-phosphate
  modified_base 10: mod_base = OTHER; note = 2'-O-methyl-adenosine-3'-phosphate
  modified_base 11: mod_base = OTHER; note = 2'-O-methyl-uridine-3'-phosphate
  modified_base 12: mod_base = OTHER; note = 2'-O-methyl-guanosine-3'-phosphate
  modified_base 13: mod_base = OTHER; note = 2'-O-methyl-adenosine-3'-phosphate
  modified_base 14: mod_base = OTHER; note = 2'-deoxy-2'-fluoro-adenosine-3'-phosphate
  modified_base 15: mod_base = OTHER; note = 2'-O-methyl-guanosine-3'-phosphate
  modified_base 16: mod_base = OTHER; note = 2'-deoxy-2'-fluoro-uridine-3'-phosphate
  modified_base 17: mod_base = OTHER; note = 2'-O-methyl-guanosine-3'-phosphate
  modified_base 18: mod_base = OTHER; note = 2'-O-methyl-adenosine-3'-phosphate
  modified_base 19: mod_base = OTHER; note = 2'-O-methyl-adenosine-3'-phosphorothioate
  modified_base 20: mod_base = OTHER; note = 2'-O-methyl-uridine-3'-phosphorothioate
  modified_base 21: mod_base = OTHER; note = 2'-O-methyl-uridine-3'-phosphate
tctttatatatgaagtgaatt

SEQ ID NO: 2341 - RNA, 21 nt, synthetic construct
  source 1..21: mol_type = other RNA
  modified_base 1: mod_base = OTHER; note = 2'-O-methyl-uridine-3'-phosphorothioate
  modified_base 2: mod_base = OTHER; note = 2'-deoxy-2'-fluoro-guanosine-3'-phosphorothioate
  modified_base 3: mod_base = OTHER; note = 2'-O-methyl-cytidine-3'-phosphate
  modified_base 4: mod_base = OTHER; note = 2'-O-methyl-uridine-3'-phosphate
  modified_base 5: mod_base = OTHER; note = 2'-O-methyl-uridine-3'-phosphate
  modified_base 6: mod_base = OTHER; note = 2'-deoxy-2'-fluoro-uridine-3'-phosphate
  modified_base 7: mod_base = OTHER; note = 2'-O-methyl-adenosine-3'-phosphate
  modified_base 8: mod_base = OTHER; note = 2'-deoxy-2'-fluoro-uridine-3'-phosphate
  modified_base 9: mod_base = OTHER; note = 2'-deoxy-2'-fluoro-adenosine-3'-phosphate
  modified_base 10: mod_base = OTHER; note = 2'-O-methyl-uridine-3'-phosphate
  modified_base 11: mod_base = OTHER; note = 2'-O-methyl-adenosine-3'-phosphate
  modified_base 12: mod_base = OTHER; note = 2'-O-methyl-uridine-3'-phosphate
  modified_base 13: mod_base = OTHER; note = 2'-O-methyl-guanosine-3'-phosphate
  modified_base 14: mod_base = OTHER; note = 2'-deoxy-2'-fluoro-adenosine-3'-phosphate
  modified_base 15: mod_base = OTHER; note = 2'-O-methyl-adenosine-3'-phosphate
  modified_base 16: mod_base = OTHER; note = 2'-deoxy-2'-fluoro-guanosine-3'-phosphate
  modified_base 17: mod_base = OTHER; note = 2'-O-methyl-uridine-3'-phosphate
  modified_base 18: mod_base = OTHER; note = 2'-O-methyl-guanosine-3'-phosphate
  modified_base 19: mod_base = OTHER; note = 2'-O-methyl-adenosine-3'-phosphorothioate
  modified_base 20: mod_base = OTHER; note = 2'-O-methyl-uridine-3'-phosphorothioate
  modified_base 21: mod_base = OTHER; note = 2'-O-methyl-uridine-3'-phosphate
tgctttatatatgaagtgatt

SEQ ID NO: 2342 - RNA, 21 nt, synthetic construct
  source 1..21: mol_type = other RNA
  modified_base 1: mod_base = OTHER; note = 2'-O-methyl-uridine-3'-phosphorothioate
  modified_base 2: mod_base = OTHER; note = 2'-deoxy-2'-fluoro-uridine-3'-phosphorothioate
  modified_base 3: mod_base = OTHER; note = 2'-O-methyl-guanosine-3'-phosphate
  modified_base 4: mod_base = OTHER; note = 2'-O-methyl-cytidine-3'-phosphate
  modified_base 5: mod_base = OTHER; note = 2'-O-methyl-uridine-3'-phosphate
  modified_base 6: mod_base = OTHER; note = 2'-deoxy-2'-fluoro-uridine-3'-phosphate
  modified_base 7: mod_base = OTHER; note = 2'-O-methyl-uridine-3'-phosphate
  modified_base 8: mod_base = OTHER; note = 2'-deoxy-2'-fluoro-adenosine-3'-phosphate
  modified_base 9: mod_base = OTHER; note = 2'-deoxy-2'-fluoro-uridine-3'-phosphate
  modified_base 10: mod_base = OTHER; note = 2'-O-methyl-adenosine-3'-phosphate
  modified_base 11: mod_base = OTHER; note = 2'-O-methyl-uridine-3'-phosphate
  modified_base 12: mod_base = OTHER; note = 2'-O-methyl-adenosine-3'-phosphate
  modified_base 13: mod_base = OTHER; note = 2'-O-methyl-uridine-3'-phosphate
  modified_base 14: mod_base = OTHER; note = 2'-deoxy-2'-fluoro-guanosine-3'-phosphate
  modified_base 15: mod_base = OTHER; note = 2'-O-methyl-adenosine-3'-phosphate
  modified_base 16: mod_base = OTHER; note = 2'-deoxy-2'-fluoro-adenosine-3'-phosphate
  modified_base 17: mod_base = OTHER; note = 2'-O-methyl-guanosine-3'-phosphate
  modified_base 18: mod_base = OTHER; note = 2'-O-methyl-uridine-3'-phosphate
  modified_base 19: mod_base = OTHER; note = 2'-O-methyl-guanosine-3'-phosphorothioate
  modified_base 20: mod_base = OTHER; note = 2'-O-methyl-uridine-3'-phosphorothioate
  modified_base 21: mod_base = OTHER; note = 2'-O-methyl-uridine-3'-phosphate
ttgctttatatatgaagtgtt

SEQ ID NO: 2343 - RNA, 21 nt, synthetic construct
  source 1..21: mol_type = other RNA
  modified_base 1: mod_base = OTHER; note = 2'-O-methyl-uridine-3'-phosphorothioate
  modified_base 2: mod_base = OTHER; note = 2'-deoxy-2'-fluoro-cytidine-3'-phosphorothioate
  modified_base 3: mod_base = OTHER; note = 2'-O-methyl-adenosine-3'-phosphate
  modified_base 4: mod_base = OTHER; note = 2'-O-methyl-cytidine-3'-phosphate
  modified_base 5: mod_base = OTHER; note = 2'-O-methyl-cytidine-3'-phosphate
  modified_base 6: mod_base = OTHER; note = 2'-deoxy-2'-fluoro-uridine-3'-phosphate
  modified_base 7: mod_base = OTHER; note = 2'-O-methyl-cytidine-3'-phosphate
  modified_base 8: mod_base = OTHER; note = 2'-deoxy-2'-fluoro-adenosine-3'-phosphate
  modified_base 9: mod_base = OTHER; note = 2'-deoxy-2'-fluoro-adenosine-3'-phosphate
  modified_base 10: mod_base = OTHER; note = 2'-O-methyl-adenosine-3'-phosphate
  modified_base 11: mod_base = OTHER; note = 2'-O-methyl-adenosine-3'-phosphate
  modified_base 12: mod_base = OTHER; note = 2'-O-methyl-guanosine-3'-phosphate
  modified_base 13: mod_base = OTHER; note = 2'-O-methyl-adenosine-3'-phosphate
  modified_base 14: mod_base = OTHER; note = 2'-deoxy-2'-fluoro-guanosine-3'-phosphate
  modified_base 15: mod_base = OTHER; note = 2'-O-methyl-uridine-3'-phosphate
  modified_base 16: mod_base = OTHER; note = 2'-deoxy-2'-fluoro-adenosine-3'-phosphate
  modified_base 17: mod_base = OTHER; note = 2'-O-methyl-adenosine-3'-phosphate
  modified_base 18: mod_base = OTHER; note = 2'-O-methyl-adenosine-3'-phosphate
  modified_base 19: mod_base = OTHER; note = 2'-O-methyl-adenosine-3'-phosphorothioate
  modified_base 20: mod_base = OTHER; note = 2'-O-methyl-uridine-3'-phosphorothioate
  modified_base 21: mod_base = OTHER; note = 2'-O-methyl-uridine-3'-phosphate
tcacctcaaaagagtaaaatt

SEQ ID NO: 2344 - RNA, 21 nt, synthetic construct
  source 1..21: mol_type = other RNA
  modified_base 1: mod_base = OTHER; note = 2'-O-methyl-uridine-3'-phosphorothioate
  modified_base 2: mod_base = OTHER; note = 2'-deoxy-2'-fluoro-uridine-3'-phosphorothioate
  modified_base 3: mod_base = OTHER; note = 2'-O-methyl-cytidine-3'-phosphate
  modified_base 4: mod_base = OTHER; note = 2'-O-methyl-adenosine-3'-phosphate
  modified_base 5: mod_base = OTHER; note = 2'-O-methyl-cytidine-3'-phosphate
  modified_base 6: mod_base = OTHER; note = 2'-deoxy-2'-fluoro-cytidine-3'-phosphate
  modified_base 7: mod_base = OTHER; note = 2'-O-methyl-uridine-3'-phosphate
  modified_base 8: mod_base = OTHER; note = 2'-deoxy-2'-fluoro-cytidine-3'-phosphate
  modified_base 9: mod_base = OTHER; note = 2'-deoxy-2'-fluoro-adenosine-3'-phosphate
  modified_base 10: mod_base = OTHER; note = 2'-O-methyl-adenosine-3'-phosphate
  modified_base 11: mod_base = OTHER; note = 2'-O-methyl-adenosine-3'-phosphate
  modified_base 12: mod_base = OTHER; note = 2'-O-methyl-adenosine-3'-phosphate
  modified_base 13: mod_base = OTHER; note = 2'-O-methyl-guanosine-3'-phosphate
  modified_base 14: mod_base = OTHER; note = 2'-deoxy-2'-fluoro-adenosine-3'-phosphate
  modified_base 15: mod_base = OTHER; note = 2'-O-methyl-guanosine-3'-phosphate
  modified_base 16: mod_base = OTHER; note = 2'-deoxy-2'-fluoro-uridine-3'-phosphate
  modified_base 17: mod_base = OTHER; note = 2'-O-methyl-adenosine-3'-phosphate
  modified_base 18: mod_base = OTHER; note = 2'-O-methyl-adenosine-3'-phosphate
  modified_base 19: mod_base = OTHER; note = 2'-O-methyl-adenosine-3'-phosphorothioate
  modified_base 20: mod_base = OTHER; note = 2'-O-methyl-uridine-3'-phosphorothioate
  modified_base 21: mod_base = OTHER; note = 2'-O-methyl-uridine-3'-phosphate
ttcacctcaaaagagtaaatt

SEQ ID NO: 2345 - RNA, 21 nt, synthetic construct
  source 1..21: mol_type = other RNA
  modified_base 1: mod_base = OTHER; note = 2'-O-methyl-uridine-3'-phosphorothioate
  modified_base 2: mod_base = OTHER; note = 2'-deoxy-2'-fluoro-uridine-3'-phosphorothioate
  modified_base 3: mod_base = OTHER; note = 2'-O-methyl-uridine-3'-phosphate
  modified_base 4: mod_base = OTHER; note = 2'-O-methyl-cytidine-3'-phosphate
  modified_base 5: mod_base = OTHER; note = 2'-O-methyl-adenosine-3'-phosphate
  modified_base 6: mod_base = OTHER; note = 2'-deoxy-2'-fluoro-cytidine-3'-phosphate
  modified_base 7: mod_base = OTHER; note = 2'-O-methyl-cytidine-3'-phosphate
  modified_base 8: mod_base = OTHER; note = 2'-deoxy-2'-fluoro-uridine-3'-phosphate
  modified_base 9: mod_base = OTHER; note = 2'-deoxy-2'-fluoro-cytidine-3'-phosphate
  modified_base 10: mod_base = OTHER; note = 2'-O-methyl-adenosine-3'-phosphate
  modified_base 11: mod_base = OTHER; note = 2'-O-methyl-adenosine-3'-phosphate
  modified_base 12: mod_base = OTHER; note = 2'-O-methyl-adenosine-3'-phosphate
  modified_base 13: mod_base = OTHER; note = 2'-O-methyl-adenosine-3'-phosphate
  modified_base 14: mod_base = OTHER; note = 2'-deoxy-2'-fluoro-guanosine-3'-phosphate
  modified_base 15: mod_base = OTHER; note = 2'-O-methyl-adenosine-3'-phosphate
  modified_base 16: mod_base = OTHER; note = 2'-deoxy-2'-fluoro-guanosine-3'-phosphate
  modified_base 17: mod_base = OTHER; note = 2'-O-methyl-uridine-3'-phosphate
  modified_base 18: mod_base = OTHER; note = 2'-O-methyl-adenosine-3'-phosphate
  modified_base 19: mod_base = OTHER; note = 2'-O-methyl-adenosine-3'-phosphorothioate
  modified_base 20: mod_base = OTHER; note = 2'-O-methyl-uridine-3'-phosphorothioate
  modified_base 21: mod_base = OTHER; note = 2'-O-methyl-uridine-3'-phosphate
tttcacctcaaaagagtaatt

SEQ ID NO: 2346 - RNA, 21 nt, synthetic construct
  source 1..21: mol_type = other RNA
  modified_base 1: mod_base = OTHER; note = 2'-O-methyl-uridine-3'-phosphorothioate
  modified_base 2: mod_base = OTHER; note = 2'-deoxy-2'-fluoro-adenosine-3'-phosphorothioate
  modified_base 3: mod_base = OTHER; note = 2'-O-methyl-uridine-3'-phosphate
  modified_base 4: mod_base = OTHER; note = 2'-O-methyl-uridine-3'-phosphate
  modified_base 5: mod_base = OTHER; note = 2'-O-methyl-cytidine-3'-phosphate
  modified_base 6: mod_base = OTHER; note = 2'-deoxy-2'-fluoro-adenosine-3'-phosphate
  modified_base 7: mod_base = OTHER; note = 2'-O-methyl-cytidine-3'-phosphate
  modified_base 8: mod_base = OTHER; note = 2'-deoxy-2'-fluoro-cytidine-3'-phosphate
  modified_base 9: mod_base = OTHER; note = 2'-deoxy-2'-fluoro-uridine-3'-phosphate
  modified_base 10: mod_base = OTHER; note = 2'-O-methyl-cytidine-3'-phosphate
  modified_base 11: mod_base = OTHER; note = 2'-O-methyl-adenosine-3'-phosphate
  modified_base 12: mod_base = OTHER; note = 2'-O-methyl-adenosine-3'-phosphate
  modified_base 13: mod_base = OTHER; note = 2'-O-methyl-adenosine-3'-phosphate
  modified_base 14: mod_base = OTHER; note = 2'-deoxy-2'-fluoro-adenosine-3'-phosphate
  modified_base 15: mod_base = OTHER; note = 2'-O-methyl-guanosine-3'-phosphate
  modified_base 16: mod_base = OTHER; note = 2'-deoxy-2'-fluoro-adenosine-3'-phosphate
  modified_base 17: mod_base = OTHER; note = 2'-O-methyl-guanosine-3'-phosphate
  modified_base 18: mod_base = OTHER; note = 2'-O-methyl-uridine-3'-phosphate
  modified_base 19: mod_base = OTHER; note = 2'-O-methyl-adenosine-3'-phosphorothioate
  modified_base 20: mod_base = OTHER; note = 2'-O-methyl-uridine-3'-phosphorothioate
  modified_base 21: mod_base = OTHER; note = 2'-O-methyl-uridine-3'-phosphate
tattcacctcaaaagagtatt

SEQ ID NO: 2347 - RNA, 21 nt, synthetic construct
  source 1..21: mol_type = other RNA
  modified_base 1: mod_base = OTHER; note = 2'-O-methyl-uridine-3'-phosphorothioate
  modified_base 2: mod_base = OTHER; note = 2'-deoxy-2'-fluoro-uridine-3'-phosphorothioate
  modified_base 3: mod_base = OTHER; note = 2'-O-methyl-guanosine-3'-phosphate
  modified_base 4: mod_base = OTHER; note = 2'-O-methyl-adenosine-3'-phosphate
  modified_base 5: mod_base = OTHER; note = 2'-O-methyl-uridine-3'-phosphate
  modified_base 6: mod_base = OTHER; note = 2'-deoxy-2'-fluoro-adenosine-3'-phosphate
  modified_base 7: mod_base = OTHER; note = 2'-O-methyl-cytidine-3'-phosphate
  modified_base 8: mod_base = OTHER; note = 2'-deoxy-2'-fluoro-uridine-3'-phosphate
  modified_base 9: mod_base = OTHER; note = 2'-deoxy-2'-fluoro-uridine-3'-phosphate
  modified_base 10: mod_base = OTHER; note = 2'-O-methyl-guanosine-3'-phosphate
  modified_base 11: mod_base = OTHER; note = 2'-O-methyl-guanosine-3'-phosphate
  modified_base 12: mod_base = OTHER; note = 2'-O-methyl-uridine-3'-phosphate
  modified_base 13: mod_base = OTHER; note = 2'-O-methyl-guanosine-3'-phosphate
  modified_base 14: mod_base = OTHER; note = 2'-deoxy-2'-fluoro-adenosine-3'-phosphate
  modified_base 15: mod_base = OTHER; note = 2'-O-methyl-adenosine-3'-phosphate
  modified_base 16: mod_base = OTHER; note = 2'-deoxy-2'-fluoro-guanosine-3'-phosphate
  modified_base 17: mod_base = OTHER; note = 2'-O-methyl-adenosine-3'-phosphate
  modified_base 18: mod_base = OTHER; note = 2'-O-methyl-cytidine-3'-phosphate
  modified_base 19: mod_base = OTHER; note = 2'-O-methyl-cytidine-3'-phosphorothioate
  modified_base 20: mod_base = OTHER; note = 2'-O-methyl-uridine-3'-phosphorothioate
  modified_base 21: mod_base = OTHER; note = 2'-O-methyl-uridine-3'-phosphate
ttgatacttggtgaagacctt

SEQ ID NO: 2348 - RNA, 21 nt, synthetic construct
  source 1..21: mol_type = other RNA
  modified_base 1: mod_base = OTHER; note = 2'-O-methyl-uridine-3'-phosphorothioate
  modified_base 2: mod_base = OTHER; note = 2'-deoxy-2'-fluoro-guanosine-3'-phosphorothioate
  modified_base 3: mod_base = OTHER; note = 2'-O-methyl-uridine-3'-phosphate
  modified_base 4: mod_base = OTHER; note = 2'-O-methyl-guanosine-3'-phosphate
  modified_base 5: mod_base = OTHER; note = 2'-O-methyl-uridine-3'-phosphate
  modified_base 6: mod_base = OTHER; note = 2'-deoxy-2'-fluoro-uridine-3'-phosphate
  modified_base 7: mod_base = OTHER; note = 2'-O-methyl-adenosine-3'-phosphate
  modified_base 8: mod_base = OTHER; note = 2'-deoxy-2'-fluoro-uridine-3'-phosphate
  modified_base 9: mod_base = OTHER; note = 2'-deoxy-2'-fluoro-uridine-3'-phosphate
  modified_base 10: mod_base = OTHER; note = 2'-O-methyl-adenosine-3'-phosphate
  modified_base 11: mod_base = OTHER; note = 2'-O-methyl-cytidine-3'-phosphate
  modified_base 12: mod_base = OTHER; note = 2'-O-methyl-uridine-3'-phosphate
  modified_base 13: mod_base = OTHER; note = 2'-O-methyl-uridine-3'-phosphate
  modified_base 14: mod_base = OTHER; note = 2'-deoxy-2'-fluoro-uridine-3'-phosphate
  modified_base 15: mod_base = OTHER; note = 2'-O-methyl-guanosine-3'-phosphate
  modified_base 16: mod_base = OTHER; note = 2'-deoxy-2'-fluoro-adenosine-3'-phosphate
  modified_base 17: mod_base = OTHER; note = 2'-O-methyl-uridine-3'-phosphate
  modified_base 18: mod_base = OTHER; note = 2'-O-methyl-adenosine-3'-phosphate
  modified_base 19: mod_base = OTHER; note = 2'-O-methyl-cytidine-3'-phosphorothioate
  modified_base 20: mod_base = OTHER; note = 2'-O-methyl-uridine-3'-phosphorothioate
  modified_base 21: mod_base = OTHER; note = 2'-O-methyl-uridine-3'-phosphate
tgtgttattactttgatactt

SEQ ID NO: 2349 - RNA, 21 nt, synthetic construct
  source 1..21: mol_type = other RNA
  modified_base 1: mod_base = OTHER; note = 2'-O-methyl-uridine-3'-phosphorothioate
  modified_base 2: mod_base = OTHER; note = 2'-deoxy-2'-fluoro-adenosine-3'-phosphorothioate
  modified_base 3: mod_base = OTHER; note = 2'-O-methyl-uridine-3'-phosphate
  modified_base 4: mod_base = OTHER; note = 2'-O-methyl-uridine-3'-phosphate
  modified_base 5: mod_base = OTHER; note = 2'-O-methyl-uridine-3'-phosphate
  modified_base 6: mod_base = OTHER; note = 2'-deoxy-2'-fluoro-guanosine-3'-phosphate
  modified_base 7: mod_base = OTHER; note = 2'-O-methyl-uridine-3'-phosphate
  modified_base 8: mod_base = OTHER; note = 2'-deoxy-2'-fluoro-guanosine-3'-phosphate
  modified_base 9: mod_base = OTHER; note = 2'-deoxy-2'-fluoro-uridine-3'-phosphate
  modified_base 10: mod_base = OTHER; note = 2'-O-methyl-uridine-3'-phosphate
  modified_base 11: mod_base = OTHER; note = 2'-O-methyl-adenosine-3'-phosphate
  modified_base 12: mod_base = OTHER; note = 2'-O-methyl-uridine-3'-phosphate
  modified_base 13: mod_base = OTHER; note = 2'-O-methyl-uridine-3'-phosphate
  modified_base 14: mod_base = OTHER; note = 2'-deoxy-2'-fluoro-adenosine-3'-phosphate
  modified_base 15: mod_base = OTHER; note = 2'-O-methyl-cytidine-3'-phosphate
  modified_base 16: mod_base = OTHER; note = 2'-deoxy-2'-fluoro-uridine-3'-phosphate
  modified_base 17: mod_base = OTHER; note = 2'-O-methyl-uridine-3'-phosphate
  modified_base 18: mod_base = OTHER; note = 2'-O-methyl-uridine-3'-phosphate
  modified_base 19: mod_base = OTHER; note = 2'-O-methyl-guanosine-3'-phosphorothioate
  modified_base 20: mod_base = OTHER; note = 2'-O-methyl-uridine-3'-phosphorothioate
  modified_base 21: mod_base = OTHER; note = 2'-O-methyl-uridine-3'-phosphate
tatttgtgttattactttgtt

SEQ ID NO: 2350 - RNA, 21 nt, synthetic construct
  source 1..21: mol_type = other RNA
  modified_base 1: mod_base = OTHER; note = 2'-O-methyl-uridine-3'-phosphorothioate
  modified_base 2: mod_base = OTHER; note = 2'-deoxy-2'-fluoro-uridine-3'-phosphorothioate
  modified_base 3: mod_base = OTHER; note = 2'-O-methyl-uridine-3'-phosphate
  modified_base 4: mod_base = OTHER; note = 2'-O-methyl-cytidine-3'-phosphate
  modified_base 5: mod_base = OTHER; note = 2'-O-methyl-adenosine-3'-phosphate
  modified_base 6: mod_base = OTHER; note = 2'-deoxy-2'-fluoro-uridine-3'-phosphate
  modified_base 7: mod_base = OTHER; note = 2'-O-methyl-uridine-3'-phosphate
  modified_base 8: mod_base = OTHER; note = 2'-deoxy-2'-fluoro-uridine-3'-phosphate
  modified_base 9: mod_base = OTHER; note = 2'-deoxy-2'-fluoro-guanosine-3'-phosphate
  modified_base 10: mod_base = OTHER; note = 2'-O-methyl-uridine-3'-phosphate
  modified_base 11: mod_base = OTHER; note = 2'-O-methyl-guanosine-3'-phosphate
  modified_base 12: mod_base = OTHER; note = 2'-O-methyl-uridine-3'-phosphate
  modified_base 13: mod_base = OTHER; note = 2'-O-methyl-uridine-3'-phosphate
  modified_base 14: mod_base = OTHER; note = 2'-deoxy-2'-fluoro-adenosine-3'-phosphate
  modified_base 15: mod_base = OTHER; note = 2'-O-methyl-uridine-3'-phosphate
  modified_base 16: mod_base = OTHER; note = 2'-deoxy-2'-fluoro-uridine-3'-phosphate
  modified_base 17: mod_base = OTHER; note = 2'-O-methyl-adenosine-3'-phosphate
  modified_base 18: mod_base = OTHER; note = 2'-O-methyl-cytidine-3'-phosphate
  modified_base 19: mod_base = OTHER; note = 2'-O-methyl-uridine-3'-phosphorothioate
  modified_base 20: mod_base = OTHER; note = 2'-O-methyl-uridine-3'-phosphorothioate
  modified_base 21: mod_base = OTHER; note = 2'-O-methyl-uridine-3'-phosphate
tttcatttgtgttattacttt

SEQ ID NO: 2351 - RNA, 21 nt, synthetic construct
  source 1..21: mol_type = other RNA
  modified_base 1: mod_base = OTHER; note = 2'-O-methyl-uridine-3'-phosphorothioate
  modified_base 2: mod_base = OTHER; note = 2'-deoxy-2'-fluoro-adenosine-3'-phosphorothioate
  modified_base 3: mod_base = OTHER; note = 2'-O-methyl-adenosine-3'-phosphate
  modified_base 4: mod_base = OTHER; note = 2'-O-methyl-cytidine-3'-phosphate
  modified_base 5: mod_base = OTHER; note = 2'-O-methyl-adenosine-3'-phosphate
  modified_base 6: mod_base = OTHER; note = 2'-deoxy-2'-fluoro-guanosine-3'-phosphate
  modified_base 7: mod_base = OTHER; note = 2'-O-methyl-adenosine-3'-phosphate
  modified_base 8: mod_base = OTHER; note = 2'-deoxy-2'-fluoro-uridine-3'-phosphate
  modified_base 9: mod_base = OTHER; note = 2'-deoxy-2'-fluoro-guanosine-3'-phosphate
  modified_base 10: mod_base = OTHER; note = 2'-O-methyl-uridine-3'-phosphate
  modified_base 11: mod_base = OTHER; note = 2'-O-methyl-guanosine-3'-phosphate
  modified_base 12: mod_base = OTHER; note = 2'-O-methyl-adenosine-3'-phosphate
  modified_base 13: mod_base = OTHER; note = 2'-O-methyl-guanosine-3'-phosphate
  modified_base 14: mod_base = OTHER; note = 2'-deoxy-2'-fluoro-guanosine-3'-phosphate
  modified_base 15: mod_base = OTHER; note = 2'-O-methyl-adenosine-3'-phosphate
  modified_base 16: mod_base = OTHER; note = 2'-deoxy-2'-fluoro-guanosine-3'-phosphate
  modified_base 17: mod_base = OTHER; note = 2'-O-methyl-uridine-3'-phosphate
  modified_base 18: mod_base = OTHER; note = 2'-O-methyl-cytidine-3'-phosphate
  modified_base 19: mod_base = OTHER; note = 2'-O-methyl-adenosine-3'-phosphorothioate
  modified_base 20: mod_base = OTHER; note = 2'-O-methyl-uridine-3'-phosphorothioate
  modified_base 21: mod_base = OTHER; note = 2'-O-methyl-uridine-3'-phosphate
taacagatgtgaggagtcatt

SEQ ID NO: 2352 - RNA, 21 nt, synthetic construct
  source 1..21: mol_type = other RNA
  modified_base 1: mod_base = OTHER; note = 2'-O-methyl-uridine-3'-phosphorothioate
  modified_base 2: mod_base = OTHER; note = 2'-deoxy-2'-fluoro-adenosine-3'-phosphorothioate
  modified_base 3: mod_base = OTHER; note = 2'-O-methyl-uridine-3'-phosphate
  modified_base 4: mod_base = OTHER; note = 2'-O-methyl-adenosine-3'-phosphate
  modified_base 5: mod_base = OTHER; note = 2'-O-methyl-adenosine-3'-phosphate
  modified_base 6: mod_base = OTHER; note = 2'-deoxy-2'-fluoro-cytidine-3'-phosphate
  modified_base 7: mod_base = OTHER; note = 2'-O-methyl-adenosine-3'-phosphate
  modified_base 8: mod_base = OTHER; note = 2'-deoxy-2'-fluoro-guanosine-3'-phosphate
  modified_base 9: mod_base = OTHER; note = 2'-deoxy-2'-fluoro-adenosine-3'-phosphate
  modified_base 10: mod_base = OTHER; note = 2'-O-methyl-uridine-3'-phosphate
  modified_base 11: mod_base = OTHER; note = 2'-O-methyl-guanosine-3'-phosphate
  modified_base 12: mod_base = OTHER; note = 2'-O-methyl-uridine-3'-phosphate
  modified_base 13: mod_base = OTHER; note = 2'-O-methyl-guanosine-3'-phosphate
  modified_base 14: mod_base = OTHER; note = 2'-deoxy-2'-fluoro-adenosine-3'-phosphate
  modified_base 15: mod_base = OTHER; note = 2'-O-methyl-guanosine-3'-phosphate
  modified_base 16: mod_base = OTHER; note = 2'-deoxy-2'-fluoro-guanosine-3'-phosphate
  modified_base 17: mod_base = OTHER; note = 2'-O-methyl-adenosine-3'-phosphate
  modified_base 18: mod_base = OTHER; note = 2'-O-methyl-guanosine-3'-phosphate
  modified_base 19: mod_base = OTHER; note = 2'-O-methyl-uridine-3'-phosphorothioate
  modified_base 20: mod_base = OTHER; note = 2'-O-methyl-uridine-3'-phosphorothioate
  modified_base 21: mod_base = OTHER; note = 2'-O-methyl-uridine-3'-phosphate
tataacagatgtgaggagttt

SEQ ID NO: 2353 - RNA, 21 nt, synthetic construct
  source 1..21: mol_type = other RNA
  modified_base 1: mod_base = OTHER; note = 2'-O-methyl-uridine-3'-phosphorothioate
  modified_base 2: mod_base = OTHER; note = 2'-deoxy-2'-fluoro-guanosine-3'-phosphorothioate
  modified_base 3: mod_base = OTHER; note = 2'-O-methyl-adenosine-3'-phosphate
  modified_base 4: mod_base = OTHER; note = 2'-O-methyl-uridine-3'-phosphate
  modified_base 5: mod_base = OTHER; note = 2'-O-methyl-adenosine-3'-phosphate
  modified_base 6: mod_base = OTHER; note = 2'-deoxy-2'-fluoro-adenosine-3'-phosphate
  modified_base 7: mod_base = OTHER; note = 2'-O-methyl-cytidine-3'-phosphate
  modified_base 8: mod_base = OTHER; note = 2'-deoxy-2'-fluoro-adenosine-3'-phosphate
  modified_base 9: mod_base = OTHER; note = 2'-deoxy-2'-fluoro-guanosine-3'-phosphate
  modified_base 10: mod_base = OTHER; note = 2'-O-methyl-adenosine-3'-phosphate
  modified_base 11: mod_base = OTHER; note = 2'-O-methyl-uridine-3'-phosphate
  modified_base 12: mod_base = OTHER; note = 2'-O-methyl-guanosine-3'-phosphate
  modified_base 13: mod_base = OTHER; note = 2'-O-methyl-uridine-3'-phosphate
  modified_base 14: mod_base = OTHER; note = 2'-deoxy-2'-fluoro-guanosine-3'-phosphate
  modified_base 15: mod_base = OTHER; note = 2'-O-methyl-adenosine-3'-phosphate
  modified_base 16: mod_base = OTHER; note = 2'-deoxy-2'-fluoro-guanosine-3'-phosphate
  modified_base 17: mod_base = OTHER; note = 2'-O-methyl-guanosine-3'-phosphate
  modified_base 18: mod_base = OTHER; note = 2'-O-methyl-adenosine-3'-phosphate
  modified_base 19: mod_base = OTHER; note = 2'-O-methyl-guanosine-3'-phosphorothioate
  modified_base 20: mod_base = OTHER; note = 2'-O-methyl-uridine-3'-phosphorothioate
  modified_base 21: mod_base = OTHER; note = 2'-O-methyl-uridine-3'-phosphate
tgataacagatgtgaggagtt

SEQ ID NO: 2354 - RNA, 21 nt, synthetic construct
  source 1..21: mol_type = other RNA
  modified_base 1: mod_base = OTHER; note = 2'-O-methyl-uridine-3'-phosphorothioate
  modified_base 2: mod_base = OTHER; note = 2'-deoxy-2'-fluoro-adenosine-3'-phosphorothioate
  modified_base 3: mod_base = OTHER; note = 2'-O-methyl-guanosine-3'-phosphate
  modified_base 4: mod_base = OTHER; note = 2'-O-methyl-adenosine-3'-phosphate
  modified_base 5: mod_base = OTHER; note = 2'-O-methyl-uridine-3'-phosphate
  modified_base 6: mod_base = OTHER; note = 2'-deoxy-2'-fluoro-adenosine-3'-phosphate
  modified_base 7: mod_base = OTHER; note = 2'-O-methyl-adenosine-3'-phosphate
  modified_base 8: mod_base = OTHER; note = 2'-deoxy-2'-fluoro-cytidine-3'-phosphate
  modified_base 9: mod_base = OTHER; note = 2'-deoxy-2'-fluoro-adenosine-3'-phosphate
  modified_base 10: mod_base = OTHER; note = 2'-O-methyl-guanosine-3'-phosphate
  modified_base 11: mod_base = OTHER; note = 2'-O-methyl-adenosine-3'-phosphate
  modified_base 12: mod_base = OTHER; note = 2'-O-methyl-uridine-3'-phosphate
  modified_base 13: mod_base = OTHER; note = 2'-O-methyl-guanosine-3'-phosphate
  modified_base 14: mod_base = OTHER; note = 2'-deoxy-2'-fluoro-uridine-3'-phosphate
  modified_base 15: mod_base = OTHER; note = 2'-O-methyl-guanosine-3'-phosphate
  modified_base 16: mod_base = OTHER; note = 2'-deoxy-2'-fluoro-adenosine-3'-phosphate
  modified_base 17: mod_base = OTHER; note = 2'-O-methyl-guanosine-3'-phosphate
  modified_base 18: mod_base = OTHER; note = 2'-O-methyl-guanosine-3'-phosphate
  modified_base 19: mod_base = OTHER; note = 2'-O-methyl-adenosine-3'-phosphorothioate
  modified_base 20: mod_base = OTHER; note = 2'-O-methyl-uridine-3'-phosphorothioate
  modified_base 21: mod_base = OTHER; note = 2'-O-methyl-uridine-3'-phosphate
tagataacagatgtgaggatt

SEQ ID NO: 2355 - RNA, 21 nt, synthetic construct
  source 1..21: mol_type = other RNA
  modified_base 1: mod_base = OTHER; note = 2'-O-methyl-uridine-3'-phosphorothioate
  modified_base 2: mod_base = OTHER; note = 2'-deoxy-2'-fluoro-adenosine-3'-phosphorothioate
  modified_base 3: mod_base = OTHER; note = 2'-O-methyl-uridine-3'-phosphate
  modified_base 4: mod_base = OTHER; note = 2'-O-methyl-guanosine-3'-phosphate
  modified_base 5: mod_base = OTHER; note = 2'-O-methyl-uridine-3'-phosphate
  modified_base 6: mod_base = OTHER; note = 2'-deoxy-2'-fluoro-uridine-3'-phosphate
  modified_base 7: mod_base = OTHER; note = 2'-O-methyl-adenosine-3'-phosphate
  modified_base 8: mod_base = OTHER; note = 2'-deoxy-2'-fluoro-adenosine-3'-phosphate
  modified_base 9: mod_base = OTHER; note = 2'-deoxy-2'-fluoro-uridine-3'-phosphate
  modified_base 10: mod_base = OTHER; note = 2'-O-methyl-guanosine-3'-phosphate
  modified_base 11: mod_base = OTHER; note = 2'-O-methyl-uridine-3'-phosphate
  modified_base 12: mod_base = OTHER; note = 2'-O-methyl-guanosine-3'-phosphate
  modified_base 13: mod_base = OTHER; note = 2'-O-methyl-guanosine-3'-phosphate
  modified_base 14: mod_base = OTHER; note = 2'-deoxy-2'-fluoro-cytidine-3'-phosphate
  modified_base 15: mod_base = OTHER; note = 2'-O-methyl-adenosine-3'-phosphate
  modified_base 16: mod_base = OTHER; note = 2'-deoxy-2'-fluoro-uridine-3'-phosphate
  modified_base 17: mod_base = OTHER; note = 2'-O-methyl-adenosine-3'-phosphate
  modified_base 18: mod_base = OTHER; note = 2'-O-methyl-guanosine-3'-phosphate
  modified_base 19: mod_base = OTHER; note = 2'-O-methyl-adenosine-3'-phosphorothioate
  modified_base 20: mod_base = OTHER; note = 2'-O-methyl-uridine-3'-phosphorothioate
  modified_base 21: mod_base = OTHER; note = 2'-O-methyl-uridine-3'-phosphate
tatgttaatgtggcatagatt

SEQ ID NO: 2356 - RNA, 21 nt, synthetic construct
  source 1..21: mol_type = other RNA
  modified_base 1: mod_base = OTHER; note = 2'-O-methyl-uridine-3'-phosphorothioate
  modified_base 2: mod_base = OTHER; note = 2'-deoxy-2'-fluoro-guanosine-3'-phosphorothioate
  modified_base 3: mod_base = OTHER; note = 2'-O-methyl-adenosine-3'-phosphate
  modified_base 4: mod_base = OTHER; note = 2'-O-methyl-uridine-3'-phosphate
  modified_base 5: mod_base = OTHER; note = 2'-O-methyl-uridine-3'-phosphate
  modified_base 6: mod_base = OTHER; note = 2'-deoxy-2'-fluoro-cytidine-3'-phosphate
  modified_base 7: mod_base = OTHER; note = 2'-O-methyl-uridine-3'-phosphate
  modified_base 8: mod_base = OTHER; note = 2'-deoxy-2'-fluoro-cytidine-3'-phosphate
  modified_base 9: mod_base = OTHER; note = 2'-deoxy-2'-fluoro-adenosine-3'-phosphate
  modified_base 10: mod_base = OTHER; note = 2'-O-methyl-uridine-3'-phosphate
  modified_base 11: mod_base = OTHER; note = 2'-O-methyl-cytidine-3'-phosphate
  modified_base 12: mod_base = OTHER; note = 2'-O-methyl-adenosine-3'-phosphate
  modified_base 13: mod_base = OTHER; note = 2'-O-methyl-adenosine-3'-phosphate
  modified_base 14: mod_base = OTHER; note = 2'-deoxy-2'-fluoro-cytidine-3'-phosphate
  modified_base 15: mod_base = OTHER; note = 2'-O-methyl-uridine-3'-phosphate
  modified_base 16: mod_base = OTHER; note = 2'-deoxy-2'-fluoro-uridine-3'-phosphate
  modified_base 17: mod_base = OTHER; note = 2'-O-methyl-uridine-3'-phosphate
  modified_base 18: mod_base = OTHER; note = 2'-O-methyl-adenosine-3'-phosphate
  modified_base 19: mod_base = OTHER; note = 2'-O-methyl-adenosine-3'-phosphorothioate
  modified_base 20: mod_base = OTHER; note = 2'-O-methyl-uridine-3'-phosphorothioate
  modified_base 21: mod_base = OTHER; note = 2'-O-methyl-uridine-3'-phosphate
tgattctcatcaactttaatt

SEQ ID NO: 2357 - RNA, 21 nt, synthetic construct
  source 1..21: mol_type = other RNA
  modified_base 1: mod_base = OTHER; note = 2'-O-methyl-uridine-3'-phosphorothioate
  modified_base 2: mod_base = OTHER; note = 2'-deoxy-2'-fluoro-cytidine-3'-phosphorothioate
  modified_base 3: mod_base = OTHER; note = 2'-O-methyl-cytidine-3'-phosphate
  modified_base 4: mod_base = OTHER; note = 2'-O-methyl-adenosine-3'-phosphate
  modified_base 5: mod_base = OTHER; note = 2'-O-methyl-uridine-3'-phosphate
  modified_base 6: mod_base = OTHER; note = 2'-deoxy-2'-fluoro-adenosine-3'-phosphate
  modified_base 7: mod_base = OTHER; note = 2'-O-methyl-cytidine-3'-phosphate
  modified_base 8: mod_base = OTHER; note = 2'-deoxy-2'-fluoro-uridine-3'-phosphate
  modified_base 9: mod_base = OTHER; note = 2'-deoxy-2'-fluoro-uridine-3'-phosphate
  modified_base 10: mod_base = OTHER; note = 2'-O-methyl-guanosine-3'-phosphate
  modified_base 11: mod_base = OTHER; note = 2'-O-methyl-adenosine-3'-phosphate
  modified_base 12: mod_base = OTHER; note = 2'-O-methyl-uridine-3'-phosphate
  modified_base 13: mod_base = OTHER; note = 2'-O-methyl-uridine-3'-phosphate
  modified_base 14: mod_base = OTHER; note = 2'-deoxy-2'-fluoro-cytidine-3'-phosphate
  modified_base 15: mod_base = OTHER; note = 2'-O-methyl-uridine-3'-phosphate
  modified_base 16: mod_base = OTHER; note = 2'-deoxy-2'-fluoro-cytidine-3'-phosphate
  modified_base 17: mod_base = OTHER; note = 2'-O-methyl-adenosine-3'-phosphate
  modified_base 18: mod_base = OTHER; note = 2'-O-methyl-uridine-3'-phosphate
  modified_base 19: mod_base = OTHER; note = 2'-O-methyl-cytidine-3'-phosphorothioate
  modified_base 20: mod_base = OTHER; note = 2'-O-methyl-uridine-3'-phosphorothioate
  modified_base 21: mod_base = OTHER; note = 2'-O-methyl-uridine-3'-phosphate
tccatacttgattctcatctt

SEQ ID NO: 2358 - RNA, 21 nt, synthetic construct
  source 1..21: mol_type = other RNA
  modified_base 1: mod_base = OTHER; note = 2'-O-methyl-uridine-3'-phosphorothioate
  modified_base 2: mod_base = OTHER; note = 2'-deoxy-2'-fluoro-uridine-3'-phosphorothioate
  modified_base 3: mod_base = OTHER; note = 2'-O-methyl-cytidine-3'-phosphate
  modified_base 4: mod_base = OTHER; note = 2'-O-methyl-cytidine-3'-phosphate
  modified_base 5: mod_base = OTHER; note = 2'-O-methyl-adenosine-3'-phosphate
  modified_base 6: mod_base = OTHER; note = 2'-deoxy-2'-fluoro-uridine-3'-phosphate
  modified_base 7: mod_base = OTHER; note = 2'-O-methyl-adenosine-3'-phosphate
  modified_base 8: mod_base = OTHER; note = 2'-deoxy-2'-fluoro-cytidine-3'-phosphate
  modified_base 9: mod_base = OTHER; note = 2'-deoxy-2'-fluoro-uridine-3'-phosphate
  modified_base 10: mod_base = OTHER; note = 2'-O-methyl-uridine-3'-phosphate
  modified_base 11: mod_base = OTHER; note = 2'-O-methyl-guanosine-3'-phosphate
  modified_base 12: mod_base = OTHER; note = 2'-O-methyl-adenosine-3'-phosphate
  modified_base 13: mod_base = OTHER; note = 2'-O-methyl-uridine-3'-phosphate
  modified_base 14: mod_base = OTHER; note = 2'-deoxy-2'-fluoro-uridine-3'-phosphate
  modified_base 15: mod_base = OTHER; note = 2'-O-methyl-cytidine-3'-phosphate
  modified_base 16: mod_base = OTHER; note = 2'-deoxy-2'-fluoro-uridine-3'-phosphate
  modified_base 17: mod_base = OTHER; note = 2'-O-methyl-cytidine-3'-phosphate
  modified_base 18: mod_base = OTHER; note = 2'-O-methyl-adenosine-3'-phosphate
  modified_base 19: mod_base = OTHER; note = 2'-O-methyl-uridine-3'-phosphorothioate
  modified_base 20: mod_base = OTHER; note = 2'-O-methyl-uridine-3'-phosphorothioate
  modified_base 21: mod_base = OTHER; note = 2'-O-methyl-uridine-3'-phosphate
ttccatacttgattctcattt

SEQ ID NO: 2359 - RNA, 21 nt, synthetic construct
  source 1..21: mol_type = other RNA
  modified_base 1: mod_base = OTHER; note = 2'-O-methyl-uridine-3'-phosphorothioate
  modified_base 2: mod_base = OTHER; note = 2'-deoxy-2'-fluoro-uridine-3'-phosphorothioate
  modified_base 3: mod_base = OTHER; note = 2'-O-methyl-uridine-3'-phosphate
  modified_base 4: mod_base = OTHER; note = 2'-O-methyl-uridine-3'-phosphate
  modified_base 5: mod_base = OTHER; note = 2'-O-methyl-cytidine-3'-phosphate
  modified_base 6: mod_base = OTHER; note = 2'-deoxy-2'-fluoro-cytidine-3'-phosphate
  modified_base 7: mod_base = OTHER; note = 2'-O-methyl-adenosine-3'-phosphate
  modified_base 8: mod_base = OTHER; note = 2'-deoxy-2'-fluoro-uridine-3'-phosphate
  modified_base 9: mod_base = OTHER; note = 2'-deoxy-2'-fluoro-adenosine-3'-phosphate
  modified_base 10: mod_base = OTHER; note = 2'-O-methyl-cytidine-3'-phosphate
  modified_base 11: mod_base = OTHER; note = 2'-O-methyl-uridine-3'-phosphate
  modified_base 12: mod_base = OTHER; note = 2'-O-methyl-uridine-3'-phosphate
  modified_base 13: mod_base = OTHER; note = 2'-O-methyl-guanosine-3'-phosphate
  modified_base 14: mod_base = OTHER; note = 2'-deoxy-2'-fluoro-adenosine-3'-phosphate
  modified_base 15: mod_base = OTHER; note = 2'-O-methyl-uridine-3'-phosphate
  modified_base 16: mod_base = OTHER; note = 2'-deoxy-2'-fluoro-uridine-3'-phosphate
  modified_base 17: mod_base = OTHER; note = 2'-O-methyl-cytidine-3'-phosphate
  modified_base 18: mod_base = OTHER; note = 2'-O-methyl-uridine-3'-phosphate
  modified_base 19: mod_base = OTHER; note = 2'-O-methyl-cytidine-3'-phosphorothioate
  modified_base 20: mod_base = OTHER; note = 2'-O-methyl-uridine-3'-phosphorothioate
  modified_base 21: mod_base = OTHER; note = 2'-O-methyl-uridine-3'-phosphate
ttttccatacttgattctctt

SEQ ID NO: 2360 - RNA, 21 nt, synthetic construct
  source 1..21: mol_type = other RNA
  modified_base 1: mod_base = OTHER; note = 2'-O-methyl-uridine-3'-phosphorothioate
  modified_base 2: mod_base = OTHER; note = 2'-deoxy-2'-fluoro-uridine-3'-phosphorothioate
  modified_base 3: mod_base = OTHER; note = 2'-O-methyl-uridine-3'-phosphate
  modified_base 4: mod_base = OTHER; note = 2'-O-methyl-uridine-3'-phosphate
  modified_base 5: mod_base = OTHER; note = 2'-O-methyl-uridine-3'-phosphate
  modified_base 6: mod_base = OTHER; note = 2'-deoxy-2'-fluoro-cytidine-3'-phosphate
  modified_base 7: mod_base = OTHER; note = 2'-O-methyl-cytidine-3'-phosphate
  modified_base 8: mod_base = OTHER; note = 2'-deoxy-2'-fluoro-adenosine-3'-phosphate
  modified_base 9: mod_base = OTHER; note = 2'-deoxy-2'-fluoro-uridine-3'-phosphate
  modified_base 10: mod_base = OTHER; note = 2'-O-methyl-adenosine-3'-phosphate
  modified_base 11: mod_base = OTHER; note = 2'-O-methyl-cytidine-3'-phosphate
  modified_base 12: mod_base = OTHER; note = 2'-O-methyl-uridine-3'-phosphate
  modified_base 13: mod_base = OTHER; note = 2'-O-methyl-uridine-3'-phosphate
  modified_base 14: mod_base = OTHER; note = 2'-deoxy-2'-fluoro-guanosine-3'-phosphate
  modified_base 15: mod_base = OTHER; note = 2'-O-methyl-adenosine-3'-phosphate
  modified_base 16: mod_base = OTHER; note = 2'-deoxy-2'-fluoro-uridine-3'-phosphate
  modified_base 17: mod_base = OTHER; note = 2'-O-methyl-uridine-3'-phosphate
  modified_base 18: mod_base = OTHER; note = 2'-O-methyl-cytidine-3'-phosphate
  modified_base 19: mod_base = OTHER; note = 2'-O-methyl-uridine-3'-phosphorothioate
  modified_base 20: mod_base = OTHER; note = 2'-O-methyl-uridine-3'-phosphorothioate
  modified_base 21: mod_base = OTHER; note = 2'-O-methyl-uridine-3'-phosphate
tttttccatacttgattcttt

SEQ ID NO: 2361 - RNA, 21 nt, synthetic construct
  source 1..21: mol_type = other RNA
  modified_base 1: mod_base = OTHER; note = 2'-O-methyl-uridine-3'-phosphorothioate
  modified_base 2: mod_base = OTHER; note = 2'-deoxy-2'-fluoro-cytidine-3'-phosphorothioate
  modified_base 3: mod_base = OTHER; note = 2'-O-methyl-uridine-3'-phosphate
  modified_base 4: mod_base = OTHER; note = 2'-O-methyl-uridine-3'-phosphate
  modified_base 5: mod_base = OTHER; note = 2'-O-methyl-uridine-3'-phosphate
  modified_base 6: mod_base = OTHER; note = 2'-deoxy-2'-fluoro-uridine-3'-phosphate
  modified_base 7: mod_base = OTHER; note = 2'-O-methyl-cytidine-3'-phosphate
  modified_base 8: mod_base = OTHER; note = 2'-deoxy-2'-fluoro-cytidine-3'-phosphate
  modified_base 9: mod_base = OTHER; note = 2'-deoxy-2'-fluoro-adenosine-3'-phosphate
  modified_base 10: mod_base = OTHER; note = 2'-O-methyl-uridine-3'-phosphate
  modified_base 11: mod_base = OTHER; note = 2'-O-methyl-adenosine-3'-phosphate
  modified_base 12: mod_base = OTHER; note = 2'-O-methyl-cytidine-3'-phosphate
  modified_base 13: mod_base = OTHER; note = 2'-O-methyl-uridine-3'-phosphate
  modified_base 14: mod_base = OTHER; note = 2'-deoxy-2'-fluoro-uridine-3'-phosphate
  modified_base 15: mod_base = OTHER; note = 2'-O-methyl-guanosine-3'-phosphate
  modified_base 16: mod_base = OTHER; note = 2'-deoxy-2'-fluoro-adenosine-3'-phosphate
  modified_base 17: mod_base = OTHER; note = 2'-O-methyl-uridine-3'-phosphate
  modified_base 18: mod_base = OTHER; note = 2'-O-methyl-uridine-3'-phosphate
  modified_base 19: mod_base = OTHER; note = 2'-O-methyl-cytidine-3'-phosphorothioate
  modified_base 20: mod_base = OTHER; note = 2'-O-methyl-uridine-3'-phosphorothioate
  modified_base 21: mod_base = OTHER; note = 2'-O-methyl-uridine-3'-phosphate
tcttttccatacttgattctt

SEQ ID NO: 2362 - RNA, 21 nt, synthetic construct
  source 1..21: mol_type = other RNA
  modified_base 1: mod_base = OTHER; note = 2'-O-methyl-uridine-3'-phosphorothioate
  modified_base 2: mod_base = OTHER; note = 2'-deoxy-2'-fluoro-adenosine-3'-phosphorothioate
  modified_base 3: mod_base = OTHER; note = 2'-O-methyl-cytidine-3'-phosphate
  modified_base 4: mod_base = OTHER; note = 2'-O-methyl-uridine-3'-phosphate
  modified_base 5: mod_base = OTHER; note = 2'-O-methyl-uridine-3'-phosphate
  modified_base 6: mod_base = OTHER; note = 2'-deoxy-2'-fluoro-uridine-3'-phosphate
  modified_base 7: mod_base = OTHER; note = 2'-O-methyl-uridine-3'-phosphate
  modified_base 8: mod_base = OTHER; note = 2'-deoxy-2'-fluoro-cytidine-3'-phosphate
  modified_base 9: mod_base = OTHER; note = 2'-deoxy-2'-fluoro-cytidine-3'-phosphate
  modified_base 10: mod_base = OTHER; note = 2'-O-methyl-adenosine-3'-phosphate
  modified_base 11: mod_base = OTHER; note = 2'-O-methyl-uridine-3'-phosphate
  modified_base 12: mod_base = OTHER; note = 2'-O-methyl-adenosine-3'-phosphate
  modified_base 13: mod_base = OTHER; note = 2'-O-methyl-cytidine-3'-phosphate
  modified_base 14: mod_base = OTHER; note = 2'-deoxy-2'-fluoro-uridine-3'-phosphate
  modified_base 15: mod_base = OTHER; note = 2'-O-methyl-uridine-3'-phosphate
  modified_base 16: mod_base = OTHER; note = 2'-deoxy-2'-fluoro-guanosine-3'-phosphate
  modified_base 17: mod_base = OTHER; note = 2'-O-methyl-adenosine-3'-phosphate
  modified_base 18: mod_base = OTHER; note = 2'-O-methyl-uridine-3'-phosphate
  modified_base 19: mod_base = OTHER; note = 2'-O-methyl-uridine-3'-phosphorothioate
  modified_base 20: mod_base = OTHER; note = 2'-O-methyl-uridine-3'-phosphorothioate
  modified_base 21: mod_base = OTHER; note = 2'-O-methyl-uridine-3'-phosphate
tacttttccatacttgatttt

SEQ ID NO: 2363 - RNA, 21 nt, synthetic construct
  source 1..21: mol_type = other RNA
  modified_base 1: mod_base = OTHER; note = 2'-O-methyl-uridine-3'-phosphorothioate
  modified_base 2: mod_base = OTHER; note = 2'-deoxy-2'-fluoro-uridine-3'-phosphorothioate
  modified_base 3: mod_base = OTHER; note = 2'-O-methyl-adenosine-3'-phosphate
  modified_base 4: mod_base = OTHER; note = 2'-O-methyl-cytidine-3'-phosphate
  modified_base 5: mod_base = OTHER; note = 2'-O-methyl-uridine-3'-phosphate
  modified_base 6: mod_base = OTHER; note = 2'-deoxy-2'-fluoro-uridine-3'-phosphate
  modified_base 7: mod_base = OTHER; note = 2'-O-methyl-uridine-3'-phosphate
  modified_base 8: mod_base = OTHER; note = 2'-deoxy-2'-fluoro-uridine-3'-phosphate
  modified_base 9: mod_base = OTHER; note = 2'-deoxy-2'-fluoro-cytidine-3'-phosphate
  modified_base 10: mod_base = OTHER; note = 2'-O-methyl-cytidine-3'-phosphate
  modified_base 11: mod_base = OTHER; note = 2'-O-methyl-adenosine-3'-phosphate
  modified_base 12: mod_base = OTHER; note = 2'-O-methyl-uridine-3'-phosphate
  modified_base 13: mod_base = OTHER; note = 2'-O-methyl-adenosine-3'-phosphate
  modified_base 14: mod_base = OTHER; note = 2'-deoxy-2'-fluoro-cytidine-3'-phosphate
  modified_base 15: mod_base = OTHER; note = 2'-O-methyl-uridine-3'-phosphate
  modified_base 16: mod_base = OTHER; note = 2'-deoxy-2'-fluoro-uridine-3'-phosphate
  modified_base 17: mod_base = OTHER; note = 2'-O-methyl-guanosine-3'-phosphate
  modified_base 18: mod_base = OTHER; note = 2'-O-methyl-adenosine-3'-phosphate
  modified_base 19: mod_base = OTHER; note = 2'-O-methyl-uridine-3'-phosphorothioate
  modified_base 20: mod_base = OTHER; note = 2'-O-methyl-uridine-3'-phosphorothioate
  modified_base 21: mod_base = OTHER; note = 2'-O-methyl-uridine-3'-phosphate
ttacttttccatacttgattt

SEQ ID NO: 2364 - RNA, 21 nt, synthetic construct
  source 1..21: mol_type = other RNA
  modified_base 1: mod_base = OTHER; note = 2'-O-methyl-uridine-3'-phosphorothioate
  modified_base 2: mod_base = OTHER; note = 2'-deoxy-2'-fluoro-uridine-3'-phosphorothioate
  modified_base 3: mod_base = OTHER; note = 2'-O-methyl-uridine-3'-phosphate
  modified_base 4: mod_base = OTHER; note = 2'-O-methyl-adenosine-3'-phosphate
  modified_base 5: mod_base = OTHER; note = 2'-O-methyl-cytidine-3'-phosphate
  modified_base 6: mod_base = OTHER; note = 2'-deoxy-2'-fluoro-uridine-3'-phosphate
  modified_base 7: mod_base = OTHER; note = 2'-O-methyl-uridine-3'-phosphate
  modified_base 8: mod_base = OTHER; note = 2'-deoxy-2'-fluoro-uridine-3'-phosphate
  modified_base 9: mod_base = OTHER; note = 2'-deoxy-2'-fluoro-uridine-3'-phosphate
  modified_base 10: mod_base = OTHER; note = 2'-O-methyl-cytidine-3'-phosphate
  modified_base 11: mod_base = OTHER; note = 2'-O-methyl-cytidine-3'-phosphate
  modified_base 12: mod_base = OTHER; note = 2'-O-methyl-adenosine-3'-phosphate
  modified_base 13: mod_base = OTHER; note = 2'-O-methyl-uridine-3'-phosphate
  modified_base 14: mod_base = OTHER; note = 2'-deoxy-2'-fluoro-adenosine-3'-phosphate
  modified_base 15: mod_base = OTHER; note = 2'-O-methyl-cytidine-3'-phosphate
  modified_base 16: mod_base = OTHER; note = 2'-deoxy-2'-fluoro-uridine-3'-phosphate
  modified_base 17: mod_base = OTHER; note = 2'-O-methyl-uridine-3'-phosphate
  modified_base 18: mod_base = OTHER; note = 2'-O-methyl-guanosine-3'-phosphate
  modified_base 19: mod_base = OTHER; note = 2'-O-methyl-adenosine-3'-phosphorothioate
  modified_base 20: mod_base = OTHER; note = 2'-O-methyl-uridine-3'-phosphorothioate
  modified_base 21: mod_base = OTHER; note = 2'-O-methyl-uridine-3'-phosphate
tttacttttccatacttgatt

SEQ ID NO: 2365 - RNA, 21 nt, synthetic construct
  source 1..21: mol_type = other RNA
  modified_base 1: mod_base = OTHER; note = 2'-O-methyl-uridine-3'-phosphorothioate
  modified_base 2: mod_base = OTHER; note = 2'-deoxy-2'-fluoro-cytidine-3'-phosphorothioate
  modified_base 3: mod_base = OTHER; note = 2'-O-methyl-uridine-3'-phosphate
  modified_base 4: mod_base = OTHER; note = 2'-O-methyl-uridine-3'-phosphate
  modified_base 5: mod_base = OTHER; note = 2'-O-methyl-adenosine-3'-phosphate
  modified_base 6: mod_base = OTHER; note = 2'-deoxy-2'-fluoro-cytidine-3'-phosphate
  modified_base 7: mod_base = OTHER; note = 2'-O-methyl-uridine-3'-phosphate
  modified_base 8: mod_base = OTHER; note = 2'-deoxy-2'-fluoro-uridine-3'-phosphate
  modified_base 9: mod_base = OTHER; note = 2'-deoxy-2'-fluoro-uridine-3'-phosphate
  modified_base 10: mod_base = OTHER; note = 2'-O-methyl-uridine-3'-phosphate
  modified_base 11: mod_base = OTHER; note = 2'-O-methyl-cytidine-3'-phosphate
  modified_base 12: mod_base = OTHER; note = 2'-O-methyl-cytidine-3'-phosphate
  modified_base 13: mod_base = OTHER; note = 2'-O-methyl-adenosine-3'-phosphate
  modified_base 14: mod_base = OTHER; note = 2'-deoxy-2'-fluoro-uridine-3'-phosphate
  modified_base 15: mod_base = OTHER; note = 2'-O-methyl-adenosine-3'-phosphate
  modified_base 16: mod_base = OTHER; note = 2'-deoxy-2'-fluoro-cytidine-3'-phosphate
  modified_base 17: mod_base = OTHER; note = 2'-O-methyl-uridine-3'-phosphate
  modified_base 18: mod_base = OTHER; note = 2'-O-methyl-uridine-3'-phosphate
  modified_base 19: mod_base = OTHER; note = 2'-O-methyl-guanosine-3'-phosphorothioate
  modified_base 20: mod_base = OTHER; note = 2'-O-methyl-uridine-3'-phosphorothioate
  modified_base 21: mod_base = OTHER; note = 2'-O-methyl-uridine-3'-phosphate
tcttacttttccatacttgtt

SEQ ID NO: 2366 - RNA, 21 nt, synthetic construct
  source 1..21: mol_type = other RNA
  modified_base 1: mod_base = OTHER; note = 2'-O-methyl-uridine-3'-phosphorothioate
  modified_base 2: mod_base = OTHER; note = 2'-deoxy-2'-fluoro-cytidine-3'-phosphorothioate
  modified_base 3: mod_base = OTHER; note = 2'-O-methyl-cytidine-3'-phosphate
  modified_base 4: mod_base = OTHER; note = 2'-O-methyl-uridine-3'-phosphate
  modified_base 5: mod_base = OTHER; note = 2'-O-methyl-uridine-3'-phosphate
  modified_base 6: mod_base = OTHER; note = 2'-deoxy-2'-fluoro-adenosine-3'-phosphate
  modified_base 7: mod_base = OTHER; note = 2'-O-methyl-cytidine-3'-phosphate
  modified_base 8: mod_base = OTHER; note = 2'-deoxy-2'-fluoro-uridine-3'-phosphate
  modified_base 9: mod_base = OTHER; note = 2'-deoxy-2'-fluoro-uridine-3'-phosphate
  modified_base 10: mod_base = OTHER; note = 2'-O-methyl-uridine-3'-phosphate
  modified_base 11: mod_base = OTHER; note = 2'-O-methyl-uridine-3'-phosphate
  modified_base 12: mod_base = OTHER; note = 2'-O-methyl-cytidine-3'-phosphate
  modified_base 13: mod_base = OTHER; note = 2'-O-methyl-cytidine-3'-phosphate
  modified_base 14: mod_base = OTHER; note = 2'-deoxy-2'-fluoro-adenosine-3'-phosphate
  modified_base 15: mod_base = OTHER; note = 2'-O-methyl-uridine-3'-phosphate
  modified_base 16: mod_base = OTHER; note = 2'-deoxy-2'-fluoro-adenosine-3'-phosphate
  modified_base 17: mod_base = OTHER; note = 2'-O-methyl-cytidine-3'-phosphate
  modified_base 18: mod_base = OTHER; note = 2'-O-methyl-uridine-3'-phosphate
  modified_base 19: mod_base = OTHER; note = 2'-O-methyl-uridine-3'-phosphorothioate
  modified_base 20: mod_base = OTHER; note = 2'-O-methyl-uridine-3'-phosphorothioate
  modified_base 21: mod_base = OTHER; note = 2'-O-methyl-uridine-3'-phosphate
tccttacttttccatactttt

SEQ ID NO: 2367 - RNA, 21 nt, synthetic construct
  source 1..21: mol_type = other RNA
  modified_base 1: mod_base = OTHER; note = 2'-O-methyl-uridine-3'-phosphorothioate
  modified_base 2: mod_base = OTHER; note = 2'-deoxy-2'-fluoro-guanosine-3'-phosphorothioate
  modified_base 3: mod_base = OTHER; note = 2'-O-methyl-cytidine-3'-phosphate
  modified_base 4: mod_base = OTHER; note = 2'-O-methyl-cytidine-3'-phosphate
  modified_base 5: mod_base = OTHER; note = 2'-O-methyl-uridine-3'-phosphate
  modified_base 6: mod_base = OTHER; note = 2'-deoxy-2'-fluoro-uridine-3'-phosphate
  modified_base 7: mod_base = OTHER; note = 2'-O-methyl-adenosine-3'-phosphate
  modified_base 8: mod_base = OTHER; note = 2'-deoxy-2'-fluoro-cytidine-3'-phosphate
  modified_base 9: mod_base = OTHER; note = 2'-deoxy-2'-fluoro-uridine-3'-phosphate
  modified_base 10: mod_base = OTHER; note = 2'-O-methyl-uridine-3'-phosphate
  modified_base 11: mod_base = OTHER; note = 2'-O-methyl-uridine-3'-phosphate
  modified_base 12: mod_base = OTHER; note = 2'-O-methyl-uridine-3'-phosphate
  modified_base 13: mod_base = OTHER; note = 2'-O-methyl-cytidine-3'-phosphate
  modified_base 14: mod_base = OTHER; note = 2'-deoxy-2'-fluoro-cytidine-3'-phosphate
  modified_base 15: mod_base = OTHER; note = 2'-O-methyl-adenosine-3'-phosphate
  modified_base 16: mod_base = OTHER; note = 2'-deoxy-2'-fluoro-uridine-3'-phosphate
  modified_base 17: mod_base = OTHER; note = 2'-O-methyl-adenosine-3'-phosphate
  modified_base 18: mod_base = OTHER; note = 2'-O-methyl-cytidine-3'-phosphate
  modified_base 19: mod_base = OTHER; note = 2'-O-methyl-uridine-3'-phosphorothioate
  modified_base 20: mod_base = OTHER; note = 2'-O-methyl-uridine-3'-phosphorothioate
  modified_base 21: mod_base = OTHER; note = 2'-O-methyl-uridine-3'-phosphate
tgccttacttttccatacttt

SEQ ID NO: 2368 - RNA, 21 nt, synthetic construct
  source 1..21: mol_type = other RNA
  modified_base 1: mod_base = OTHER; note = 2'-O-methyl-uridine-3'-phosphorothioate
  modified_base 2: mod_base = OTHER; note = 2'-deoxy-2'-fluoro-guanosine-3'-phosphorothioate
  modified_base 3: mod_base = OTHER; note = 2'-O-methyl-guanosine-3'-phosphate
  modified_base 4: mod_base = OTHER; note = 2'-O-methyl-cytidine-3'-phosphate
  modified_base 5: mod_base = OTHER; note = 2'-O-methyl-cytidine-3'-phosphate
  modified_base 6: mod_base = OTHER; note = 2'-deoxy-2'-fluoro-uridine-3'-phosphate
  modified_base 7: mod_base = OTHER; note = 2'-O-methyl-uridine-3'-phosphate
  modified_base 8: mod_base = OTHER; note = 2'-deoxy-2'-fluoro-adenosine-3'-phosphate
  modified_base 9: mod_base = OTHER; note = 2'-deoxy-2'-fluoro-cytidine-3'-phosphate
  modified_base 10: mod_base = OTHER; note = 2'-O-methyl-uridine-3'-phosphate
  modified_base 11: mod_base = OTHER; note = 2'-O-methyl-uridine-3'-phosphate
  modified_base 12: mod_base = OTHER; note = 2'-O-methyl-uridine-3'-phosphate
  modified_base 13: mod_base = OTHER; note = 2'-O-methyl-uridine-3'-phosphate
  modified_base 14: mod_base = OTHER; note = 2'-deoxy-2'-fluoro-cytidine-3'-phosphate
  modified_base 15: mod_base = OTHER; note = 2'-O-methyl-cytidine-3'-phosphate
  modified_base 16: mod_base = OTHER; note = 2'-deoxy-2'-fluoro-adenosine-3'-phosphate
  modified_base 17: mod_base = OTHER; note = 2'-O-methyl-uridine-3'-phosphate
  modified_base 18: mod_base = OTHER; note = 2'-O-methyl-adenosine-3'-phosphate
  modified_base 19: mod_base = OTHER; note = 2'-O-methyl-cytidine-3'-phosphorothioate
  modified_base 20: mod_base = OTHER; note = 2'-O-methyl-uridine-3'-phosphorothioate
  modified_base 21: mod_base = OTHER; note = 2'-O-methyl-uridine-3'-phosphate
tggccttacttttccatactt

SEQ ID NO: 2369 - RNA, 21 nt, synthetic construct
  source 1..21: mol_type = other RNA
  modified_base 1: mod_base = OTHER; note = 2'-O-methyl-uridine-3'-phosphorothioate
  modified_base 2: mod_base = OTHER; note = 2'-deoxy-2'-fluoro-uridine-3'-phosphorothioate
  modified_base 3: mod_base = OTHER; note = 2'-O-methyl-adenosine-3'-phosphate
  modified_base 4: mod_base = OTHER; note = 2'-O-methyl-uridine-3'-phosphate
  modified_base 5: mod_base = OTHER; note = 2'-O-methyl-guanosine-3'-phosphate
  modified_base 6: mod_base = OTHER; note = 2'-deoxy-2'-fluoro-guanosine-3'-phosphate
  modified_base 7: mod_base = OTHER; note = 2'-O-methyl-cytidine-3'-phosphate
  modified_base 8: mod_base = OTHER; note = 2'-deoxy-2'-fluoro-cytidine-3'-phosphate
  modified_base 9: mod_base = OTHER; note = 2'-deoxy-2'-fluoro-uridine-3'-phosphate
  modified_base 10: mod_base = OTHER; note = 2'-O-methyl-uridine-3'-phosphate
  modified_base 11: mod_base = OTHER; note = 2'-O-methyl-adenosine-3'-phosphate
  modified_base 12: mod_base = OTHER; note = 2'-O-methyl-cytidine-3'-phosphate
  modified_base 13: mod_base = OTHER; note = 2'-O-methyl-uridine-3'-phosphate
  modified_base 14: mod_base = OTHER; note = 2'-deoxy-2'-fluoro-uridine-3'-phosphate
  modified_base 15: mod_base = OTHER; note = 2'-O-methyl-uridine-3'-phosphate
  modified_base 16: mod_base = OTHER; note = 2'-deoxy-2'-fluoro-uridine-3'-phosphate
  modified_base 17: mod_base = OTHER; note = 2'-O-methyl-cytidine-3'-phosphate
  modified_base 18: mod_base = OTHER; note = 2'-O-methyl-cytidine-3'-phosphate
  modified_base 19: mod_base = OTHER; note = 2'-O-methyl-adenosine-3'-phosphorothioate
  modified_base 20: mod_base = OTHER; note = 2'-O-methyl-uridine-3'-phosphorothioate
  modified_base 21: mod_base = OTHER; note = 2'-O-methyl-uridine-3'-phosphate
ttatggccttacttttccatt

SEQ ID NO: 2370 - RNA, 21 nt, synthetic construct
  source 1..21: mol_type = other RNA
  modified_base 1: mod_base = OTHER; note = 2'-O-methyl-uridine-3'-phosphorothioate
  modified_base 2: mod_base = OTHER; note = 2'-deoxy-2'-fluoro-adenosine-3'-phosphorothioate
  modified_base 3: mod_base = OTHER; note = 2'-O-methyl-uridine-3'-phosphate
  modified_base 4: mod_base = OTHER; note = 2'-O-methyl-guanosine-3'-phosphate
  modified_base 5: mod_base = OTHER; note = 2'-O-methyl-uridine-3'-phosphate
  modified_base 6: mod_base = OTHER; note = 2'-deoxy-2'-fluoro-adenosine-3'-phosphate
  modified_base 7: mod_base = OTHER; note = 2'-O-methyl-adenosine-3'-phosphate
  modified_base 8: mod_base = OTHER; note = 2'-deoxy-2'-fluoro-guanosine-3'-phosphate
  modified_base 9: mod_base = OTHER; note = 2'-deoxy-2'-fluoro-adenosine-3'-phosphate
  modified_base 10: mod_base = OTHER; note = 2'-O-methyl-guanosine-3'-phosphate
  modified_base 11: mod_base = OTHER; note = 2'-O-methyl-uridine-3'-phosphate
  modified_base 12: mod_base = OTHER; note = 2'-O-methyl-adenosine-3'-phosphate
  modified_base 13: mod_base = OTHER; note = 2'-O-methyl-uridine-3'-phosphate
  modified_base 14: mod_base = OTHER; note = 2'-deoxy-2'-fluoro-guanosine-3'-phosphate
  modified_base 15: mod_base = OTHER; note = 2'-O-methyl-guanosine-3'-phosphate
  modified_base 16: mod_base = OTHER; note = 2'-deoxy-2'-fluoro-cytidine-3'-phosphate
  modified_base 17: mod_base = OTHER; note = 2'-O-methyl-cytidine-3'-phosphate
  modified_base 18: mod_base = OTHER; note = 2'-O-methyl-uridine-3'-phosphate
  modified_base 19: mod_base = OTHER; note = 2'-O-methyl-uridine-3'-phosphorothioate
  modified_base 20: mod_base = OTHER; note = 2'-O-methyl-uridine-3'-phosphorothioate
  modified_base 21: mod_base = OTHER; note = 2'-O-methyl-uridine-3'-phosphate
tatgtaagagtatggcctttt

SEQ ID NO: 2371 - RNA, 21 nt, synthetic construct
  source 1..21: mol_type = other RNA
  modified_base 1: mod_base = OTHER; note = 2'-O-methyl-uridine-3'-phosphorothioate
  modified_base 2: mod_base = OTHER; note = 2'-deoxy-2'-fluoro-uridine-3'-phosphorothioate
  modified_base 3: mod_base = OTHER; note = 2'-O-methyl-adenosine-3'-phosphate
  modified_base 4: mod_base = OTHER; note = 2'-O-methyl-uridine-3'-phosphate
  modified_base 5: mod_base = OTHER; note = 2'-O-methyl-uridine-3'-phosphate
  modified_base 6: mod_base = OTHER; note = 2'-deoxy-2'-fluoro-adenosine-3'-phosphate
  modified_base 7: mod_base = OTHER; note = 2'-O-methyl-uridine-3'-phosphate
  modified_base 8: mod_base = OTHER; note = 2'-deoxy-2'-fluoro-guanosine-3'-phosphate
  modified_base 9: mod_base = OTHER; note = 2'-deoxy-2'-fluoro-uridine-3'-phosphate
  modified_base 10: mod_base = OTHER; note = 2'-O-methyl-adenosine-3'-phosphate
  modified_base 11: mod_base = OTHER; note = 2'-O-methyl-adenosine-3'-phosphate
  modified_base 12: mod_base = OTHER; note = 2'-O-methyl-guanosine-3'-phosphate
  modified_base 13: mod_base = OTHER; note = 2'-O-methyl-adenosine-3'-phosphate
  modified_base 14: mod_base = OTHER; note = 2'-deoxy-2'-fluoro-guanosine-3'-phosphate
  modified_base 15: mod_base = OTHER; note = 2'-O-methyl-uridine-3'-phosphate
  modified_base 16: mod_base = OTHER; note = 2'-deoxy-2'-fluoro-adenosine-3'-phosphate
  modified_base 17: mod_base = OTHER; note = 2'-O-methyl-uridine-3'-phosphate
  modified_base 18: mod_base = OTHER; note = 2'-O-methyl-guanosine-3'-phosphate
  modified_base 19: mod_base = OTHER; note = 2'-O-methyl-guanosine-3'-phosphorothioate
  modified_base 20: mod_base = OTHER; note = 2'-O-methyl-uridine-3'-phosphorothioate
  modified_base 21: mod_base = OTHER; note = 2'-O-methyl-uridine-3'-phosphate
ttattatgtaagagtatggtt

SEQ ID NO: 2372 - RNA, 21 nt, synthetic construct
  source 1..21: mol_type = other RNA
  modified_base 1: mod_base = OTHER; note = 2'-O-methyl-uridine-3'-phosphorothioate
  modified_base 2: mod_base = OTHER; note = 2'-deoxy-2'-fluoro-uridine-3'-phosphorothioate
  modified_base 3: mod_base = OTHER; note = 2'-O-methyl-cytidine-3'-phosphate
  modified_base 4: mod_base = OTHER; note = 2'-O-methyl-uridine-3'-phosphate
  modified_base 5: mod_base = OTHER; note = 2'-O-methyl-guanosine-3'-phosphate
  modified_base 6: mod_base = OTHER; note = 2'-deoxy-2'-fluoro-uridine-3'-phosphate
  modified_base 7: mod_base = OTHER; note = 2'-O-methyl-guanosine-3'-phosphate
  modified_base 8: mod_base = OTHER; note = 2'-deoxy-2'-fluoro-adenosine-3'-phosphate
  modified_base 9: mod_base = OTHER; note = 2'-deoxy-2'-fluoro-uridine-3'-phosphate
  modified_base 10: mod_base = OTHER; note = 2'-O-methyl-uridine-3'-phosphate
  modified_base 11: mod_base = OTHER; note = 2'-O-methyl-cytidine-3'-phosphate
  modified_base 12: mod_base = OTHER; note = 2'-O-methyl-uridine-3'-phosphate
  modified_base 13: mod_base = OTHER; note = 2'-O-methyl-uridine-3'-phosphate
  modified_base 14: mod_base = OTHER; note = 2'-deoxy-2'-fluoro-uridine-3'-phosphate
  modified_base 15: mod_base = OTHER; note = 2'-O-methyl-guanosine-3'-phosphate
  modified_base 16: mod_base = OTHER; note = 2'-deoxy-2'-fluoro-adenosine-3'-phosphate
  modified_base 17: mod_base = OTHER; note = 2'-O-methyl-adenosine-3'-phosphate
  modified_base 18: mod_base = OTHER; note = 2'-O-methyl-adenosine-3'-phosphate
  modified_base 19: mod_base = OTHER; note = 2'-O-methyl-adenosine-3'-phosphorothioate
  modified_base 20: mod_base = OTHER; note = 2'-O-methyl-uridine-3'-phosphorothioate
  modified_base 21: mod_base = OTHER; note = 2'-O-methyl-uridine-3'-phosphate
ttctgtgattctttgaaaatt

SEQ ID NO: 2373 - RNA, 21 nt, synthetic construct
  source 1..21: mol_type = other RNA
  modified_base 1: mod_base = OTHER; note = 2'-O-methyl-uridine-3'-phosphorothioate
  modified_base 2: mod_base = OTHER; note = 2'-deoxy-2'-fluoro-uridine-3'-phosphorothioate
  modified_base 3: mod_base = OTHER; note = 2'-O-methyl-uridine-3'-phosphate
  modified_base 4: mod_base = OTHER; note = 2'-O-methyl-cytidine-3'-phosphate
  modified_base 5: mod_base = OTHER; note = 2'-O-methyl-uridine-3'-phosphate
  modified_base 6: mod_base = OTHER; note = 2'-deoxy-2'-fluoro-guanosine-3'-phosphate
  modified_base 7: mod_base = OTHER; note = 2'-O-methyl-uridine-3'-phosphate
  modified_base 8: mod_base = OTHER; note = 2'-deoxy-2'-fluoro-guanosine-3'-phosphate
  modified_base 9: mod_base = OTHER; note = 2'-deoxy-2'-fluoro-adenosine-3'-phosphate
  modified_base 10: mod_base = OTHER; note = 2'-O-methyl-uridine-3'-phosphate
  modified_base 11: mod_base = OTHER; note = 2'-O-methyl-uridine-3'-phosphate
  modified_base 12: mod_base = OTHER; note = 2'-O-methyl-cytidine-3'-phosphate
  modified_base 13: mod_base = OTHER; note = 2'-O-methyl-uridine-3'-phosphate
  modified_base 14: mod_base = OTHER; note = 2'-deoxy-2'-fluoro-uridine-3'-phosphate
  modified_base 15: mod_base = OTHER; note = 2'-O-methyl-uridine-3'-phosphate
  modified_base 16: mod_base = OTHER; note = 2'-deoxy-2'-fluoro-guanosine-3'-phosphate
  modified_base 17: mod_base = OTHER; note = 2'-O-methyl-adenosine-3'-phosphate
  modified_base 18: mod_base = OTHER; note = 2'-O-methyl-adenosine-3'-phosphate
  modified_base 19: mod_base = OTHER; note = 2'-O-methyl-adenosine-3'-phosphorothioate
  modified_base 20: mod_base = OTHER; note = 2'-O-methyl-uridine-3'-phosphorothioate
  modified_base 21: mod_base = OTHER; note = 2'-O-methyl-uridine-3'-phosphate
tttctgtgattctttgaaatt

SEQ ID NO: 2374 - RNA, 21 nt, synthetic construct
  source 1..21: mol_type = other RNA
  modified_base 1: mod_base = OTHER; note = 2'-O-methyl-uridine-3'-phosphorothioate
  modified_base 2: mod_base = OTHER; note = 2'-deoxy-2'-fluoro-adenosine-3'-phosphorothioate
  modified_base 3: mod_base = OTHER; note = 2'-O-methyl-uridine-3'-phosphate
  modified_base 4: mod_base = OTHER; note = 2'-O-methyl-uridine-3'-phosphate
  modified_base 5: mod_base = OTHER; note = 2'-O-methyl-cytidine-3'-phosphate
  modified_base 6: mod_base = OTHER; note = 2'-deoxy-2'-fluoro-uridine-3'-phosphate
  modified_base 7: mod_base = OTHER; note = 2'-O-methyl-guanosine-3'-phosphate
  modified_base 8: mod_base = OTHER; note = 2'-deoxy-2'-fluoro-uridine-3'-phosphate
  modified_base 9: mod_base = OTHER; note = 2'-deoxy-2'-fluoro-guanosine-3'-phosphate
  modified_base 10: mod_base = OTHER; note = 2'-O-methyl-adenosine-3'-phosphate
  modified_base 11: mod_base = OTHER; note = 2'-O-methyl-uridine-3'-phosphate
  modified_base 12: mod_base = OTHER; note = 2'-O-methyl-uridine-3'-phosphate
  modified_base 13: mod_base = OTHER; note = 2'-O-methyl-cytidine-3'-phosphate
  modified_base 14: mod_base = OTHER; note = 2'-deoxy-2'-fluoro-uridine-3'-phosphate
  modified_base 15: mod_base = OTHER; note = 2'-O-methyl-uridine-3'-phosphate
  modified_base 16: mod_base = OTHER; note = 2'-deoxy-2'-fluoro-uridine-3'-phosphate
  modified_base 17: mod_base = OTHER; note = 2'-O-methyl-guanosine-3'-phosphate
  modified_base 18: mod_base = OTHER; note = 2'-O-methyl-adenosine-3'-phosphate
  modified_base 19: mod_base = OTHER; note = 2'-O-methyl-adenosine-3'-phosphorothioate
  modified_base 20: mod_base = OTHER; note = 2'-O-methyl-uridine-3'-phosphorothioate
  modified_base 21: mod_base = OTHER; note = 2'-O-methyl-uridine-3'-phosphate
tattctgtgattctttgaatt

SEQ ID NO: 2375 - RNA, 21 nt, synthetic construct
  source 1..21: mol_type = other RNA
  modified_base 1: mod_base = OTHER; note = 2'-O-methyl-uridine-3'-phosphorothioate
  modified_base 2: mod_base = OTHER; note = 2'-deoxy-2'-fluoro-uridine-3'-phosphorothioate
  modified_base 3: mod_base = OTHER; note = 2'-O-methyl-adenosine-3'-phosphate
  modified_base 4: mod_base = OTHER; note = 2'-O-methyl-cytidine-3'-phosphate
  modified_base 5: mod_base = OTHER; note = 2'-O-methyl-uridine-3'-phosphate
  modified_base 6: mod_base = OTHER; note = 2'-deoxy-2'-fluoro-adenosine-3'-phosphate
  modified_base 7: mod_base = OTHER; note = 2'-O-methyl-guanosine-3'-phosphate
  modified_base 8: mod_base = OTHER; note = 2'-deoxy-2'-fluoro-adenosine-3'-phosphate
  modified_base 9: mod_base = OTHER; note = 2'-deoxy-2'-fluoro-adenosine-3'-phosphate
  modified_base 10: mod_base = OTHER; note = 2'-O-methyl-uridine-3'-phosphate
  modified_base 11: mod_base = OTHER; note = 2'-O-methyl-uridine-3'-phosphate
  modified_base 12: mod_base = OTHER; note = 2'-O-methyl-cytidine-3'-phosphate
  modified_base 13: mod_base = OTHER; note = 2'-O-methyl-uridine-3'-phosphate
  modified_base 14: mod_base = OTHER; note = 2'-deoxy-2'-fluoro-guanosine-3'-phosphate
  modified_base 15: mod_base = OTHER; note = 2'-O-methyl-uridine-3'-phosphate
  modified_base 16: mod_base = OTHER; note = 2'-deoxy-2'-fluoro-guanosine-3'-phosphate
  modified_base 17: mod_base = OTHER; note = 2'-O-methyl-adenosine-3'-phosphate
  modified_base 18: mod_base = OTHER; note = 2'-O-methyl-uridine-3'-phosphate
  modified_base 19: mod_base = OTHER; note = 2'-O-methyl-uridine-3'-phosphorothioate
  modified_base 20: mod_base = OTHER; note = 2'-O-methyl-uridine-3'-phosphorothioate
  modified_base 21: mod_base = OTHER; note = 2'-O-methyl-uridine-3'-phosphate
ttactagaattctgtgatttt

SEQ ID NO: 2376 - RNA, 21 nt, synthetic construct
  source 1..21: mol_type = other RNA
  modified_base 1: mod_base = OTHER; note = 2'-O-methyl-uridine-3'-phosphorothioate
  modified_base 2: mod_base = OTHER; note = 2'-deoxy-2'-fluoro-guanosine-3'-phosphorothioate
  modified_base 3: mod_base = OTHER; note = 2'-O-methyl-uridine-3'-phosphate
  modified_base 4: mod_base = OTHER; note = 2'-O-methyl-adenosine-3'-phosphate
  modified_base 5: mod_base = OTHER; note = 2'-O-methyl-cytidine-3'-phosphate
  modified_base 6: mod_base = OTHER; note = 2'-deoxy-2'-fluoro-uridine-3'-phosphate
  modified_base 7: mod_base = OTHER; note = 2'-O-methyl-adenosine-3'-phosphate
  modified_base 8: mod_base = OTHER; note = 2'-deoxy-2'-fluoro-guanosine-3'-phosphate
  modified_base 9: mod_base = OTHER; note = 2'-deoxy-2'-fluoro-adenosine-3'-phosphate
  modified_base 10: mod_base = OTHER; note = 2'-O-methyl-adenosine-3'-phosphate
  modified_base 11: mod_base = OTHER; note = 2'-O-methyl-uridine-3'-phosphate
  modified_base 12: mod_base = OTHER; note = 2'-O-methyl-uridine-3'-phosphate
  modified_base 13: mod_base = OTHER; note = 2'-O-methyl-cytidine-3'-phosphate
  modified_base 14: mod_base = OTHER; note = 2'-deoxy-2'-fluoro-uridine-3'-phosphate
  modified_base 15: mod_base = OTHER; note = 2'-O-methyl-guanosine-3'-phosphate
  modified_base 16: mod_base = OTHER; note = 2'-deoxy-2'-fluoro-uridine-3'-phosphate
  modified_base 17: mod_base = OTHER; note = 2'-O-methyl-guanosine-3'-phosphate
  modified_base 18: mod_base = OTHER; note = 2'-O-methyl-adenosine-3'-phosphate
  modified_base 19: mod_base = OTHER; note = 2'-O-methyl-uridine-3'-phosphorothioate
  modified_base 20: mod_base = OTHER; note = 2'-O-methyl-uridine-3'-phosphorothioate
  modified_base 21: mod_base = OTHER; note = 2'-O-methyl-uridine-3'-phosphate
tgtactagaattctgtgattt

SEQ ID NO: 2377 - RNA, 21 nt, synthetic construct
  source 1..21: mol_type = other RNA
  modified_base 1: mod_base = OTHER; note = 2'-O-methyl-uridine-3'-phosphorothioate
  modified_base 2: mod_base = OTHER; note = 2'-deoxy-2'-fluoro-cytidine-3'-phosphorothioate
  modified_base 3: mod_base = OTHER; note = 2'-O-methyl-uridine-3'-phosphate
  modified_base 4: mod_base = OTHER; note = 2'-O-methyl-uridine-3'-phosphate
  modified_base 5: mod_base = OTHER; note = 2'-O-methyl-adenosine-3'-phosphate
  modified_base 6: mod_base = OTHER; note = 2'-deoxy-2'-fluoro-guanosine-3'-phosphate
  modified_base 7: mod_base = OTHER; note = 2'-O-methyl-adenosine-3'-phosphate
  modified_base 8: mod_base = OTHER; note = 2'-deoxy-2'-fluoro-adenosine-3'-phosphate
  modified_base 9: mod_base = OTHER; note = 2'-deoxy-2'-fluoro-cytidine-3'-phosphate
  modified_base 10: mod_base = OTHER; note = 2'-O-methyl-adenosine-3'-phosphate
  modified_base 11: mod_base = OTHER; note = 2'-O-methyl-guanosine-3'-phosphate
  modified_base 12: mod_base = OTHER; note = 2'-O-methyl-adenosine-3'-phosphate
  modified_base 13: mod_base = OTHER; note = 2'-O-methyl-uridine-3'-phosphate
  modified_base 14: mod_base = OTHER; note = 2'-deoxy-2'-fluoro-uridine-3'-phosphate
  modified_base 15: mod_base = OTHER; note = 2'-O-methyl-uridine-3'-phosphate
  modified_base 16: mod_base = OTHER; note = 2'-deoxy-2'-fluoro-adenosine-3'-phosphate
  modified_base 17: mod_base = OTHER; note = 2'-O-methyl-uridine-3'-phosphate
  modified_base 18: mod_base = OTHER; note = 2'-O-methyl-guanosine-3'-phosphate
  modified_base 19: mod_base = OTHER; note = 2'-O-methyl-adenosine-3'-phosphorothioate
  modified_base 20: mod_base = OTHER; note = 2'-O-methyl-uridine-3'-phosphorothioate
  modified_base 21: mod_base = OTHER; note = 2'-O-methyl-uridine-3'-phosphate
tcttagaacagatttatgatt

SEQ ID NO: 2378 - RNA, 21 nt, synthetic construct
  source 1..21: mol_type = other RNA
  modified_base 1: mod_base = OTHER; note = 2'-O-methyl-uridine-3'-phosphorothioate
  modified_base 2: mod_base = OTHER; note = 2'-deoxy-2'-fluoro-uridine-3'-phosphorothioate
  modified_base 3: mod_base = OTHER; note = 2'-O-methyl-cytidine-3'-phosphate
  modified_base 4: mod_base = OTHER; note = 2'-O-methyl-uridine-3'-phosphate
  modified_base 5: mod_base = OTHER; note = 2'-O-methyl-uridine-3'-phosphate
  modified_base 6: mod_base = OTHER; note = 2'-deoxy-2'-fluoro-adenosine-3'-phosphate
  modified_base 7: mod_base = OTHER; note = 2'-O-methyl-guanosine-3'-phosphate
  modified_base 8: mod_base = OTHER; note = 2'-deoxy-2'-fluoro-adenosine-3'-phosphate
  modified_base 9: mod_base = OTHER; note = 2'-deoxy-2'-fluoro-adenosine-3'-phosphate
  modified_base 10: mod_base = OTHER; note = 2'-O-methyl-cytidine-3'-phosphate
  modified_base 11: mod_base = OTHER; note = 2'-O-methyl-adenosine-3'-phosphate
  modified_base 12: mod_base = OTHER; note = 2'-O-methyl-guanosine-3'-phosphate
  modified_base 13: mod_base = OTHER; note = 2'-O-methyl-adenosine-3'-phosphate
  modified_base 14: mod_base = OTHER; note = 2'-deoxy-2'-fluoro-uridine-3'-phosphate
  modified_base 15: mod_base = OTHER; note = 2'-O-methyl-uridine-3'-phosphate
  modified_base 16: mod_base = OTHER; note = 2'-deoxy-2'-fluoro-uridine-3'-phosphate
  modified_base 17: mod_base = OTHER; note = 2'-O-methyl-adenosine-3'-phosphate
  modified_base 18: mod_base = OTHER; note = 2'-O-methyl-uridine-3'-phosphate
  modified_base 19: mod_base = OTHER; note = 2'-O-methyl-guanosine-3'-phosphorothioate
  modified_base 20: mod_base = OTHER; note = 2'-O-methyl-uridine-3'-phosphorothioate
  modified_base 21: mod_base = OTHER; note = 2'-O-methyl-uridine-3'-phosphate
ttcttagaacagatttatgtt

SEQ ID NO: 2379 - RNA, 21 nt, synthetic construct
  source 1..21: mol_type = other RNA
  modified_base 1: mod_base = OTHER; note = 2'-O-methyl-uridine-3'-phosphorothioate
  modified_base 2: mod_base = OTHER; note = 2'-deoxy-2'-fluoro-guanosine-3'-phosphorothioate
  modified_base 3: mod_base = OTHER; note = 2'-O-methyl-uridine-3'-phosphate
  modified_base 4: mod_base = OTHER; note = 2'-O-methyl-cytidine-3'-phosphate
  modified_base 5: mod_base = OTHER; note = 2'-O-methyl-uridine-3'-phosphate
  modified_base 6: mod_base = OTHER; note = 2'-deoxy-2'-fluoro-uridine-3'-phosphate
  modified_base 7: mod_base = OTHER; note = 2'-O-methyl-adenosine-3'-phosphate
  modified_base 8: mod_base = OTHER; note = 2'-deoxy-2'-fluoro-guanosine-3'-phosphate
  modified_base 9: mod_base = OTHER; note = 2'-deoxy-2'-fluoro-adenosine-3'-phosphate
  modified_base 10: mod_base = OTHER; note = 2'-O-methyl-adenosine-3'-phosphate
  modified_base 11: mod_base = OTHER; note = 2'-O-methyl-cytidine-3'-phosphate
  modified_base 12: mod_base = OTHER; note = 2'-O-methyl-adenosine-3'-phosphate
  modified_base 13: mod_base = OTHER; note = 2'-O-methyl-guanosine-3'-phosphate
  modified_base 14: mod_base = OTHER; note = 2'-deoxy-2'-fluoro-adenosine-3'-phosphate
  modified_base 15: mod_base = OTHER; note = 2'-O-methyl-uridine-3'-phosphate
  modified_base 16: mod_base = OTHER; note = 2'-deoxy-2'-fluoro-uridine-3'-phosphate
  modified_base 17: mod_base = OTHER; note = 2'-O-methyl-uridine-3'-phosphate
  modified_base 18: mod_base = OTHER; note = 2'-O-methyl-adenosine-3'-phosphate
  modified_base 19: mod_base = OTHER; note = 2'-O-methyl-uridine-3'-phosphorothioate
  modified_base 20: mod_base = OTHER; note = 2'-O-methyl-uridine-3'-phosphorothioate
  modified_base 21: mod_base = OTHER; note = 2'-O-methyl-uridine-3'-phosphate
tgtcttagaacagatttattt

SEQ ID NO: 2380 - RNA, 21 nt, synthetic construct
  source 1..21: mol_type = other RNA
  modified_base 1: mod_base = OTHER; note = 2'-O-methyl-uridine-3'-phosphorothioate
  modified_base 2: mod_base = OTHER; note = 2'-deoxy-2'-fluoro-uridine-3'-phosphorothioate
  modified_base 3: mod_base = OTHER; note = 2'-O-methyl-guanosine-3'-phosphate
  modified_base 4: mod_base = OTHER; note = 2'-O-methyl-uridine-3'-phosphate
  modified_base 5: mod_base = OTHER; note = 2'-O-methyl-cytidine-3'-phosphate
  modified_base 6: mod_base = OTHER; note = 2'-deoxy-2'-fluoro-uridine-3'-phosphate
  modified_base 7: mod_base = OTHER; note = 2'-O-methyl-uridine-3'-phosphate
  modified_base 8: mod_base = OTHER; note = 2'-deoxy-2'-fluoro-adenosine-3'-phosphate
  modified_base 9: mod_base = OTHER; note = 2'-deoxy-2'-fluoro-guanosine-3'-phosphate
  modified_base 10: mod_base = OTHER; note = 2'-O-methyl-adenosine-3'-phosphate
  modified_base 11: mod_base = OTHER; note = 2'-O-methyl-adenosine-3'-phosphate
  modified_base 12: mod_base = OTHER; note = 2'-O-methyl-cytidine-3'-phosphate
  modified_base 13: mod_base = OTHER; note = 2'-O-methyl-adenosine-3'-phosphate
  modified_base 14: mod_base = OTHER; note = 2'-deoxy-2'-fluoro-guanosine-3'-phosphate
  modified_base 15: mod_base = OTHER; note = 2'-O-methyl-adenosine-3'-phosphate
  modified_base 16: mod_base = OTHER; note = 2'-deoxy-2'-fluoro-uridine-3'-phosphate
  modified_base 17: mod_base = OTHER; note = 2'-O-methyl-uridine-3'-phosphate
  modified_base 18: mod_base = OTHER; note = 2'-O-methyl-uridine-3'-phosphate
  modified_base 19: mod_base = OTHER; note = 2'-O-methyl-adenosine-3'-phosphorothioate
  modified_base 20: mod_base = OTHER; note = 2'-O-methyl-uridine-3'-phosphorothioate
  modified_base 21: mod_base = OTHER; note = 2'-O-methyl-uridine-3'-phosphate
ttgtcttagaacagatttatt

SEQ ID NO: 2381 - RNA, 21 nt, synthetic construct
  source 1..21: mol_type = other RNA
  modified_base 1: mod_base = OTHER; note = 2'-O-methyl-uridine-3'-phosphorothioate
  modified_base 2: mod_base = OTHER; note = 2'-deoxy-2'-fluoro-adenosine-3'-phosphorothioate
  modified_base 3: mod_base = OTHER; note = 2'-O-methyl-uridine-3'-phosphate
  modified_base 4: mod_base = OTHER; note = 2'-O-methyl-adenosine-3'-phosphate
  modified_base 5: mod_base = OTHER; note = 2'-O-methyl-uridine-3'-phosphate
  modified_base 6: mod_base = OTHER; note = 2'-deoxy-2'-fluoro-guanosine-3'-phosphate
  modified_base 7: mod_base = OTHER; note = 2'-O-methyl-uridine-3'-phosphate
  modified_base 8: mod_base = OTHER; note = 2'-deoxy-2'-fluoro-cytidine-3'-phosphate
  modified_base 9: mod_base = OTHER; note = 2'-deoxy-2'-fluoro-uridine-3'-phosphate
  modified_base 10: mod_base = OTHER; note = 2'-O-methyl-uridine-3'-phosphate
  modified_base 11: mod_base = OTHER; note = 2'-O-methyl-adenosine-3'-phosphate
  modified_base 12: mod_base = OTHER; note = 2'-O-methyl-guanosine-3'-phosphate
  modified_base 13: mod_base = OTHER; note = 2'-O-methyl-adenosine-3'-phosphate
  modified_base 14: mod_base = OTHER; note = 2'-deoxy-2'-fluoro-adenosine-3'-phosphate
  modified_base 15: mod_base = OTHER; note = 2'-O-methyl-cytidine-3'-phosphate
  modified_base 16: mod_base = OTHER; note = 2'-deoxy-2'-fluoro-adenosine-3'-phosphate
  modified_base 17: mod_base = OTHER; note = 2'-O-methyl-guanosine-3'-phosphate
  modified_base 18: mod_base = OTHER; note = 2'-O-methyl-adenosine-3'-phosphate
  modified_base 19: mod_base = OTHER; note = 2'-O-methyl-uridine-3'-phosphorothioate
  modified_base 20: mod_base = OTHER; note = 2'-O-methyl-uridine-3'-phosphorothioate
  modified_base 21: mod_base = OTHER; note = 2'-O-methyl-uridine-3'-phosphate
tatatgtcttagaacagattt

SEQ ID NO: 2382 - RNA, 21 nt, synthetic construct
  source 1..21: mol_type = other RNA
  modified_base 1: mod_base = OTHER; note = 2'-O-methyl-uridine-3'-phosphorothioate
  modified_base 2: mod_base = OTHER; note = 2'-deoxy-2'-fluoro-uridine-3'-phosphorothioate
  modified_base 3: mod_base = OTHER; note = 2'-O-methyl-cytidine-3'-phosphate
  modified_base 4: mod_base = OTHER; note = 2'-O-methyl-adenosine-3'-phosphate
  modified_base 5: mod_base = OTHER; note = 2'-O-methyl-uridine-3'-phosphate
  modified_base 6: mod_base = OTHER; note = 2'-deoxy-2'-fluoro-adenosine-3'-phosphate
  modified_base 7: mod_base = OTHER; note = 2'-O-methyl-uridine-3'-phosphate
  modified_base 8: mod_base = OTHER; note = 2'-deoxy-2'-fluoro-guanosine-3'-phosphate
  modified_base 9: mod_base = OTHER; note = 2'-deoxy-2'-fluoro-uridine-3'-phosphate
  modified_base 10: mod_base = OTHER; note = 2'-O-methyl-cytidine-3'-phosphate
  modified_base 11: mod_base = OTHER; note = 2'-O-methyl-uridine-3'-phosphate
  modified_base 12: mod_base = OTHER; note = 2'-O-methyl-uridine-3'-phosphate
  modified_base 13: mod_base = OTHER; note = 2'-O-methyl-adenosine-3'-phosphate
  modified_base 14: mod_base = OTHER; note = 2'-deoxy-2'-fluoro-guanosine-3'-phosphate
  modified_base 15: mod_base = OTHER; note = 2'-O-methyl-adenosine-3'-phosphate
  modified_base 16: mod_base = OTHER; note = 2'-deoxy-2'-fluoro-adenosine-3'-phosphate
  modified_base 17: mod_base = OTHER; note = 2'-O-methyl-cytidine-3'-phosphate
  modified_base 18: mod_base = OTHER; note = 2'-O-methyl-adenosine-3'-phosphate
  modified_base 19: mod_base = OTHER; note = 2'-O-methyl-guanosine-3'-phosphorothioate
  modified_base 20: mod_base = OTHER; note = 2'-O-methyl-uridine-3'-phosphorothioate
  modified_base 21: mod_base = OTHER; note = 2'-O-methyl-uridine-3'-phosphate
ttcatatgtcttagaacagtt

SEQ ID NO: 2383 - RNA, 21 nt, synthetic construct
  source 1..21: mol_type = other RNA
  modified_base 1: mod_base = OTHER; note = 2'-O-methyl-uridine-3'-phosphorothioate
  modified_base 2: mod_base = OTHER; note = 2'-deoxy-2'-fluoro-adenosine-3'-phosphorothioate
  modified_base 3: mod_base = OTHER; note = 2'-O-methyl-uridine-3'-phosphate
  modified_base 4: mod_base = OTHER; note = 2'-O-methyl-cytidine-3'-phosphate
  modified_base 5: mod_base = OTHER; note = 2'-O-methyl-adenosine-3'-phosphate
  modified_base 6: mod_base = OTHER; note = 2'-deoxy-2'-fluoro-uridine-3'-phosphate
  modified_base 7: mod_base = OTHER; note = 2'-O-methyl-adenosine-3'-phosphate
  modified_base 8: mod_base = OTHER; note = 2'-deoxy-2'-fluoro-uridine-3'-phosphate
  modified_base 9: mod_base = OTHER; note = 2'-deoxy-2'-fluoro-guanosine-3'-phosphate
  modified_base 10: mod_base = OTHER; note = 2'-O-methyl-uridine-3'-phosphate
  modified_base 11: mod_base = OTHER; note = 2'-O-methyl-cytidine-3'-phosphate
  modified_base 12: mod_base = OTHER; note = 2'-O-methyl-uridine-3'-phosphate
  modified_base 13: mod_base = OTHER; note = 2'-O-methyl-uridine-3'-phosphate
  modified_base 14: mod_base = OTHER; note = 2'-deoxy-2'-fluoro-adenosine-3'-phosphate
  modified_base 15: mod_base = OTHER; note = 2'-O-methyl-guanosine-3'-phosphate
  modified_base 16: mod_base = OTHER; note = 2'-deoxy-2'-fluoro-adenosine-3'-phosphate
  modified_base 17: mod_base = OTHER; note = 2'-O-methyl-adenosine-3'-phosphate
  modified_base 18: mod_base = OTHER; note = 2'-O-methyl-cytidine-3'-phosphate
  modified_base 19: mod_base = OTHER; note = 2'-O-methyl-adenosine-3'-phosphorothioate
  modified_base 20: mod_base = OTHER; note = 2'-O-methyl-uridine-3'-phosphorothioate
  modified_base 21: mod_base = OTHER; note = 2'-O-methyl-uridine-3'-phosphate
tatcatatgtcttagaacatt

SEQ ID NO: 2384 - RNA, 21 nt, synthetic construct
  source 1..21: mol_type = other RNA
  modified_base 1: mod_base = OTHER; note = 2'-O-methyl-uridine-3'-phosphorothioate
  modified_base 2: mod_base = OTHER; note = 2'-deoxy-2'-fluoro-guanosine-3'-phosphorothioate
  modified_base 3: mod_base = OTHER; note = 2'-O-methyl-uridine-3'-phosphate
  modified_base 4: mod_base = OTHER; note = 2'-O-methyl-uridine-3'-phosphate
  modified_base 5: mod_base = OTHER; note = 2'-O-methyl-guanosine-3'-phosphate
  modified_base 6: mod_base = OTHER; note = 2'-deoxy-2'-fluoro-adenosine-3'-phosphate
  modified_base 7: mod_base = OTHER; note = 2'-O-methyl-uridine-3'-phosphate
  modified_base 8: mod_base = OTHER; note = 2'-deoxy-2'-fluoro-cytidine-3'-phosphate
  modified_base 9: mod_base = OTHER; note = 2'-deoxy-2'-fluoro-adenosine-3'-phosphate
  modified_base 10: mod_base = OTHER; note = 2'-O-methyl-uridine-3'-phosphate
  modified_base 11: mod_base = OTHER; note = 2'-O-methyl-adenosine-3'-phosphate
  modified_base 12: mod_base = OTHER; note = 2'-O-methyl-uridine-3'-phosphate
  modified_base 13: mod_base = OTHER; note = 2'-O-methyl-guanosine-3'-phosphate
  modified_base 14: mod_base = OTHER; note = 2'-deoxy-2'-fluoro-uridine-3'-phosphate
  modified_base 15: mod_base = OTHER; note = 2'-O-methyl-cytidine-3'-phosphate
  modified_base 16: mod_base = OTHER; note = 2'-deoxy-2'-fluoro-uridine-3'-phosphate
  modified_base 17: mod_base = OTHER; note = 2'-O-methyl-uridine-3'-phosphate
  modified_base 18: mod_base = OTHER; note = 2'-O-methyl-adenosine-3'-phosphate
  modified_base 19: mod_base = OTHER; note = 2'-O-methyl-guanosine-3'-phosphorothioate
  modified_base 20: mod_base = OTHER; note = 2'-O-methyl-uridine-3'-phosphorothioate
  modified_base 21: mod_base = OTHER; note = 2'-O-methyl-uridine-3'-phosphate
tgttgatcatatgtcttagtt

SEQ ID NO: 2385 - RNA, 21 nt, synthetic construct
  source 1..21: mol_type = other RNA
  modified_base 1: mod_base = OTHER; note = 2'-O-methyl-uridine-3'-phosphorothioate
  modified_base 2: mod_base = OTHER; note = 2'-deoxy-2'-fluoro-uridine-3'-phosphorothioate
  modified_base 3: mod_base = OTHER; note = 2'-O-methyl-guanosine-3'-phosphate
  modified_base 4: mod_base = OTHER; note = 2'-O-methyl-uridine-3'-phosphate
  modified_base 5: mod_base = OTHER; note = 2'-O-methyl-uridine-3'-phosphate
  modified_base 6: mod_base = OTHER; note = 2'-deoxy-2'-fluoro-guanosine-3'-phosphate
  modified_base 7: mod_base = OTHER; note = 2'-O-methyl-adenosine-3'-phosphate
  modified_base 8: mod_base = OTHER; note = 2'-deoxy-2'-fluoro-uridine-3'-phosphate
  modified_base 9: mod_base = OTHER; note = 2'-deoxy-2'-fluoro-cytidine-3'-phosphate
  modified_base 10: mod_base = OTHER; note = 2'-O-methyl-adenosine-3'-phosphate
  modified_base 11: mod_base = OTHER; note = 2'-O-methyl-uridine-3'-phosphate
  modified_base 12: mod_base = OTHER; note = 2'-O-methyl-adenosine-3'-phosphate
  modified_base 13: mod_base = OTHER; note = 2'-O-methyl-uridine-3'-phosphate
  modified_base 14: mod_base = OTHER; note = 2'-deoxy-2'-fluoro-guanosine-3'-phosphate
  modified_base 15: mod_base = OTHER; note = 2'-O-methyl-uridine-3'-phosphate
  modified_base 16: mod_base = OTHER; note = 2'-deoxy-2'-fluoro-cytidine-3'-phosphate
  modified_base 17: mod_base = OTHER; note = 2'-O-methyl-uridine-3'-phosphate
  modified_base 18: mod_base = OTHER; note = 2'-O-methyl-uridine-3'-phosphate
  modified_base 19: mod_base = OTHER; note = 2'-O-methyl-adenosine-3'-phosphorothioate
  modified_base 20: mod_base = OTHER; note = 2'-O-methyl-uridine-3'-phosphorothioate
  modified_base 21: mod_base = OTHER; note = 2'-O-methyl-uridine-3'-phosphate
ttgttgatcatatgtcttatt

SEQ ID NO: 2386 - RNA, 21 nt, synthetic construct
  source 1..21: mol_type = other RNA
  modified_base 1: mod_base = OTHER; note = 2'-O-methyl-uridine-3'-phosphorothioate
  modified_base 2: mod_base = OTHER; note = 2'-deoxy-2'-fluoro-uridine-3'-phosphorothioate
  modified_base 3: mod_base = OTHER; note = 2'-O-methyl-cytidine-3'-phosphate
  modified_base 4: mod_base = OTHER; note = 2'-O-methyl-adenosine-3'-phosphate
  modified_base 5: mod_base = OTHER; note = 2'-O-methyl-uridine-3'-phosphate
  modified_base 6: mod_base = OTHER; note = 2'-deoxy-2'-fluoro-cytidine-3'-phosphate
  modified_base 7: mod_base = OTHER; note = 2'-O-methyl-uridine-3'-phosphate
  modified_base 8: mod_base = OTHER; note = 2'-deoxy-2'-fluoro-guanosine-3'-phosphate
  modified_base 9: mod_base = OTHER; note = 2'-deoxy-2'-fluoro-uridine-3'-phosphate
  modified_base 10: mod_base = OTHER; note = 2'-O-methyl-uridine-3'-phosphate
  modified_base 11: mod_base = OTHER; note = 2'-O-methyl-guanosine-3'-phosphate
  modified_base 12: mod_base = OTHER; note = 2'-O-methyl-adenosine-3'-phosphate
  modified_base 13: mod_base = OTHER; note = 2'-O-methyl-uridine-3'-phosphate
  modified_base 14: mod_base = OTHER; note = 2'-deoxy-2'-fluoro-cytidine-3'-phosphate
  modified_base 15: mod_base = OTHER; note = 2'-O-methyl-adenosine-3'-phosphate
  modified_base 16: mod_base = OTHER; note = 2'-deoxy-2'-fluoro-uridine-3'-phosphate
  modified_base 17: mod_base = OTHER; note = 2'-O-methyl-adenosine-3'-phosphate
  modified_base 18: mod_base = OTHER; note = 2'-O-methyl-uridine-3'-phosphate
  modified_base 19: mod_base = OTHER; note = 2'-O-methyl-guanosine-3'-phosphorothioate
  modified_base 20: mod_base = OTHER; note = 2'-O-methyl-uridine-3'-phosphorothioate
  modified_base 21: mod_base = OTHER; note = 2'-O-methyl-uridine-3'-phosphate
ttcatctgttgatcatatgtt

SEQ ID NO: 2387 - RNA, 21 nt, synthetic construct
  source 1..21: mol_type = other RNA
  modified_base 1: mod_base = OTHER; note = 2'-O-methyl-uridine-3'-phosphorothioate
  modified_base 2: mod_base = OTHER; note = 2'-deoxy-2'-fluoro-cytidine-3'-phosphorothioate
  modified_base 3: mod_base = OTHER; note = 2'-O-methyl-uridine-3'-phosphate
  modified_base 4: mod_base = OTHER; note = 2'-O-methyl-cytidine-3'-phosphate
  modified_base 5: mod_base = OTHER; note = 2'-O-methyl-adenosine-3'-phosphate
  modified_base 6: mod_base = OTHER; note = 2'-deoxy-2'-fluoro-uridine-3'-phosphate
  modified_base 7: mod_base = OTHER; note = 2'-O-methyl-cytidine-3'-phosphate
  modified_base 8: mod_base = OTHER; note = 2'-deoxy-2'-fluoro-uridine-3'-phosphate
  modified_base 9: mod_base = OTHER; note = 2'-deoxy-2'-fluoro-guanosine-3'-phosphate
  modified_base 10: mod_base = OTHER; note = 2'-O-methyl-uridine-3'-phosphate
  modified_base 11: mod_base = OTHER; note = 2'-O-methyl-uridine-3'-phosphate
  modified_base 12: mod_base = OTHER; note = 2'-O-methyl-guanosine-3'-phosphate
  modified_base 13: mod_base = OTHER; note = 2'-O-methyl-adenosine-3'-phosphate
  modified_base 14: mod_base = OTHER; note = 2'-deoxy-2'-fluoro-uridine-3'-phosphate
  modified_base 15: mod_base = OTHER; note = 2'-O-methyl-cytidine-3'-phosphate
  modified_base 16: mod_base = OTHER; note = 2'-deoxy-2'-fluoro-adenosine-3'-phosphate
  modified_base 17: mod_base = OTHER; note = 2'-O-methyl-uridine-3'-phosphate
  modified_base 18: mod_base = OTHER; note = 2'-O-methyl-adenosine-3'-phosphate
  modified_base 19: mod_base = OTHER; note = 2'-O-methyl-uridine-3'-phosphorothioate
  modified_base 20: mod_base = OTHER; note = 2'-O-methyl-uridine-3'-phosphorothioate
  modified_base 21: mod_base = OTHER; note = 2'-O-methyl-uridine-3'-phosphate
tctcatctgttgatcatattt

SEQ ID NO: 2388 - RNA, 21 nt, synthetic construct
  source 1..21: mol_type = other RNA
  modified_base 1: mod_base = OTHER; note = 2'-O-methyl-uridine-3'-phosphorothioate
  modified_base 2: mod_base = OTHER; note = 2'-deoxy-2'-fluoro-guanosine-3'-phosphorothioate
  modified_base 3: mod_base = OTHER; note = 2'-O-methyl-uridine-3'-phosphate
  modified_base 4: mod_base = OTHER; note = 2'-O-methyl-uridine-3'-phosphate
  modified_base 5: mod_base = OTHER; note = 2'-O-methyl-cytidine-3'-phosphate
  modified_base 6: mod_base = OTHER; note = 2'-deoxy-2'-fluoro-uridine-3'-phosphate
  modified_base 7: mod_base = OTHER; note = 2'-O-methyl-cytidine-3'-phosphate
  modified_base 8: mod_base = OTHER; note = 2'-deoxy-2'-fluoro-adenosine-3'-phosphate
  modified_base 9: mod_base = OTHER; note = 2'-deoxy-2'-fluoro-uridine-3'-phosphate
  modified_base 10: mod_base = OTHER; note = 2'-O-methyl-cytidine-3'-phosphate
  modified_base 11: mod_base = OTHER; note = 2'-O-methyl-uridine-3'-phosphate
  modified_base 12: mod_base = OTHER; note = 2'-O-methyl-guanosine-3'-phosphate
  modified_base 13: mod_base = OTHER; note = 2'-O-methyl-uridine-3'-phosphate
  modified_base 14: mod_base = OTHER; note = 2'-deoxy-2'-fluoro-uridine-3'-phosphate
  modified_base 15: mod_base = OTHER; note = 2'-O-methyl-guanosine-3'-phosphate
  modified_base 16: mod_base = OTHER; note = 2'-deoxy-2'-fluoro-adenosine-3'-phosphate
  modified_base 17: mod_base = OTHER; note = 2'-O-methyl-uridine-3'-phosphate
  modified_base 18: mod_base = OTHER; note = 2'-O-methyl-cytidine-3'-phosphate
  modified_base 19: mod_base = OTHER; note = 2'-O-methyl-adenosine-3'-phosphorothioate
  modified_base 20: mod_base = OTHER; note = 2'-O-methyl-uridine-3'-phosphorothioate
  modified_base 21: mod_base = OTHER; note = 2'-O-methyl-uridine-3'-phosphate
tgttctcatctgttgatcatt

SEQ ID NO: 2389 - RNA, 21 nt, synthetic construct
  source 1..21: mol_type = other RNA
  modified_base 1: mod_base = OTHER; note = 2'-O-methyl-uridine-3'-phosphorothioate
  modified_base 2: mod_base = OTHER; note = 2'-deoxy-2'-fluoro-cytidine-3'-phosphorothioate
  modified_base 3: mod_base = OTHER; note = 2'-O-methyl-adenosine-3'-phosphate
  modified_base 4: mod_base = OTHER; note = 2'-O-methyl-guanosine-3'-phosphate
  modified_base 5: mod_base = OTHER; note = 2'-O-methyl-uridine-3'-phosphate
  modified_base 6: mod_base = OTHER; note = 2'-deoxy-2'-fluoro-uridine-3'-phosphate
  modified_base 7: mod_base = OTHER; note = 2'-O-methyl-cytidine-3'-phosphate
  modified_base 8: mod_base = OTHER; note = 2'-deoxy-2'-fluoro-uridine-3'-phosphate
  modified_base 9: mod_base = OTHER; note = 2'-deoxy-2'-fluoro-cytidine-3'-phosphate
  modified_base 10: mod_base = OTHER; note = 2'-O-methyl-adenosine-3'-phosphate
  modified_base 11: mod_base = OTHER; note = 2'-O-methyl-uridine-3'-phosphate
  modified_base 12: mod_base = OTHER; note = 2'-O-methyl-cytidine-3'-phosphate
  modified_base 13: mod_base = OTHER; note = 2'-O-methyl-uridine-3'-phosphate
  modified_base 14: mod_base = OTHER; note = 2'-deoxy-2'-fluoro-guanosine-3'-phosphate
  modified_base 15: mod_base = OTHER; note = 2'-O-methyl-uridine-3'-phosphate
  modified_base 16: mod_base = OTHER; note = 2'-deoxy-2'-fluoro-uridine-3'-phosphate
  modified_base 17: mod_base = OTHER; note = 2'-O-methyl-guanosine-3'-phosphate
  modified_base 18: mod_base = OTHER; note = 2'-O-methyl-adenosine-3'-phosphate
  modified_base 19: mod_base = OTHER; note = 2'-O-methyl-uridine-3'-phosphorothioate
  modified_base 20: mod_base = OTHER; note = 2'-O-methyl-uridine-3'-phosphorothioate
  modified_base 21: mod_base = OTHER; note = 2'-O-methyl-uridine-3'-phosphate
tcagttctcatctgttgattt

SEQ ID NO: 2390 - RNA, 21 nt, synthetic construct
  source 1..21: mol_type = other RNA
  modified_base 1: mod_base = OTHER; note = 2'-O-methyl-uridine-3'-phosphorothioate
  modified_base 2: mod_base = OTHER; note = 2'-deoxy-2'-fluoro-cytidine-3'-phosphorothioate
  modified_base 3: mod_base = OTHER; note = 2'-O-methyl-cytidine-3'-phosphate
  modified_base 4: mod_base = OTHER; note = 2'-O-methyl-adenosine-3'-phosphate
  modified_base 5: mod_base = OTHER; note = 2'-O-methyl-guanosine-3'-phosphate
  modified_base 6: mod_base = OTHER; note = 2'-deoxy-2'-fluoro-uridine-3'-phosphate
  modified_base 7: mod_base = OTHER; note = 2'-O-methyl-uridine-3'-phosphate
  modified_base 8: mod_base = OTHER; note = 2'-deoxy-2'-fluoro-cytidine-3'-phosphate
  modified_base 9: mod_base = OTHER; note = 2'-deoxy-2'-fluoro-uridine-3'-phosphate
  modified_base 10: mod_base = OTHER; note = 2'-O-methyl-cytidine-3'-phosphate
  modified_base 11: mod_base = OTHER; note = 2'-O-methyl-adenosine-3'-phosphate
  modified_base 12: mod_base = OTHER; note = 2'-O-methyl-uridine-3'-phosphate
  modified_base 13: mod_base = OTHER; note = 2'-O-methyl-cytidine-3'-phosphate
  modified_base 14: mod_base = OTHER; note = 2'-deoxy-2'-fluoro-uridine-3'-phosphate
  modified_base 15: mod_base = OTHER; note = 2'-O-methyl-guanosine-3'-phosphate
  modified_base 16: mod_base = OTHER; note = 2'-deoxy-2'-fluoro-uridine-3'-phosphate
  modified_base 17: mod_base = OTHER; note = 2'-O-methyl-uridine-3'-phosphate
  modified_base 18: mod_base = OTHER; note = 2'-O-methyl-guanosine-3'-phosphate
  modified_base 19: mod_base = OTHER; note = 2'-O-methyl-adenosine-3'-phosphorothioate
  modified_base 20: mod_base = OTHER; note = 2'-O-methyl-uridine-3'-phosphorothioate
  modified_base 21: mod_base = OTHER; note = 2'-O-methyl-uridine-3'-phosphate
tccagttctcatctgttgatt

SEQ ID NO: 2391 - RNA, 21 nt, synthetic construct
  source 1..21: mol_type = other RNA
  modified_base 1: mod_base = OTHER; note = 2'-O-methyl-uridine-3'-phosphorothioate
  modified_base 2: mod_base = OTHER; note = 2'-deoxy-2'-fluoro-guanosine-3'-phosphorothioate
  modified_base 3: mod_base = OTHER; note = 2'-O-methyl-adenosine-3'-phosphate
  modified_base 4: mod_base = OTHER; note = 2'-O-methyl-uridine-3'-phosphate
  modified_base 5: mod_base = OTHER; note = 2'-O-methyl-adenosine-3'-phosphate
  modified_base 6: mod_base = OTHER; note = 2'-deoxy-2'-fluoro-uridine-3'-phosphate
  modified_base 7: mod_base = OTHER; note = 2'-O-methyl-guanosine-3'-phosphate
  modified_base 8: mod_base = OTHER; note = 2'-deoxy-2'-fluoro-adenosine-3'-phosphate
  modified_base 9: mod_base = OTHER; note = 2'-deoxy-2'-fluoro-cytidine-3'-phosphate
  modified_base 10: mod_base = OTHER; note = 2'-O-methyl-uridine-3'-phosphate
  modified_base 11: mod_base = OTHER; note = 2'-O-methyl-adenosine-3'-phosphate
  modified_base 12: mod_base = OTHER; note = 2'-O-methyl-adenosine-3'-phosphate
  modified_base 13: mod_base = OTHER; note = 2'-O-methyl-uridine-3'-phosphate
  modified_base 14: mod_base = OTHER; note = 2'-deoxy-2'-fluoro-cytidine-3'-phosphate
  modified_base 15: mod_base = OTHER; note = 2'-O-methyl-uridine-3'-phosphate
  modified_base 16: mod_base = OTHER; note = 2'-deoxy-2'-fluoro-cytidine-3'-phosphate
  modified_base 17: mod_base = OTHER; note = 2'-O-methyl-adenosine-3'-phosphate
  modified_base 18: mod_base = OTHER; note = 2'-O-methyl-cytidine-3'-phosphate
  modified_base 19: mod_base = OTHER; note = 2'-O-methyl-uridine-3'-phosphorothioate
  modified_base 20: mod_base = OTHER; note = 2'-O-methyl-uridine-3'-phosphorothioate
  modified_base 21: mod_base = OTHER; note = 2'-O-methyl-uridine-3'-phosphate
tgatatgactaatctcacttt

SEQ ID NO: 2392 - RNA, 21 nt, synthetic construct
  source 1..21: mol_type = other RNA
  modified_base 1: mod_base = OTHER; note = 2'-O-methyl-uridine-3'-phosphorothioate
  modified_base 2: mod_base = OTHER; note = 2'-deoxy-2'-fluoro-guanosine-3'-phosphorothioate
  modified_base 3: mod_base = OTHER; note = 2'-O-methyl-uridine-3'-phosphate
  modified_base 4: mod_base = OTHER; note = 2'-O-methyl-guanosine-3'-phosphate
  modified_base 5: mod_base = OTHER; note = 2'-O-methyl-adenosine-3'-phosphate
  modified_base 6: mod_base = OTHER; note = 2'-deoxy-2'-fluoro-uridine-3'-phosphate
  modified_base 7: mod_base = OTHER; note = 2'-O-methyl-adenosine-3'-phosphate
  modified_base 8: mod_base = OTHER; note = 2'-deoxy-2'-fluoro-uridine-3'-phosphate
  modified_base 9: mod_base = OTHER; note = 2'-deoxy-2'-fluoro-guanosine-3'-phosphate
  modified_base 10: mod_base = OTHER; note = 2'-O-methyl-adenosine-3'-phosphate
  modified_base 11: mod_base = OTHER; note = 2'-O-methyl-cytidine-3'-phosphate
  modified_base 12: mod_base = OTHER; note = 2'-O-methyl-uridine-3'-phosphate
  modified_base 13: mod_base = OTHER; note = 2'-O-methyl-adenosine-3'-phosphate
  modified_base 14: mod_base = OTHER; note = 2'-deoxy-2'-fluoro-adenosine-3'-phosphate
  modified_base 15: mod_base = OTHER; note = 2'-O-methyl-uridine-3'-phosphate
  modified_base 16: mod_base = OTHER; note = 2'-deoxy-2'-fluoro-cytidine-3'-phosphate
  modified_base 17: mod_base = OTHER; note = 2'-O-methyl-uridine-3'-phosphate
  modified_base 18: mod_base = OTHER; note = 2'-O-methyl-cytidine-3'-phosphate
  modified_base 19: mod_base = OTHER; note = 2'-O-methyl-adenosine-3'-phosphorothioate
  modified_base 20: mod_base = OTHER; note = 2'-O-methyl-uridine-3'-phosphorothioate
  modified_base 21: mod_base = OTHER; note = 2'-O-methyl-uridine-3'-phosphate
tgtgatatgactaatctcatt

SEQ ID NO: 2393 - RNA, 21 nt, synthetic construct
  source 1..21: mol_type = other RNA
  modified_base 1: mod_base = OTHER; note = 2'-O-methyl-uridine-3'-phosphorothioate
  modified_base 2: mod_base = OTHER; note = 2'-deoxy-2'-fluoro-uridine-3'-phosphorothioate
  modified_base 3: mod_base = OTHER; note = 2'-O-methyl-uridine-3'-phosphate
  modified_base 4: mod_base = OTHER; note = 2'-O-methyl-guanosine-3'-phosphate
  modified_base 5: mod_base = OTHER; note = 2'-O-methyl-uridine-3'-phosphate
  modified_base 6: mod_base = OTHER; note = 2'-deoxy-2'-fluoro-uridine-3'-phosphate
  modified_base 7: mod_base = OTHER; note = 2'-O-methyl-adenosine-3'-phosphate
  modified_base 8: mod_base = OTHER; note = 2'-deoxy-2'-fluoro-guanosine-3'-phosphate
  modified_base 9: mod_base = OTHER; note = 2'-deoxy-2'-fluoro-uridine-3'-phosphate
  modified_base 10: mod_base = OTHER; note = 2'-O-methyl-adenosine-3'-phosphate
  modified_base 11: mod_base = OTHER; note = 2'-O-methyl-uridine-3'-phosphate
  modified_base 12: mod_base = OTHER; note = 2'-O-methyl-adenosine-3'-phosphate
  modified_base 13: mod_base = OTHER; note = 2'-O-methyl-uridine-3'-phosphate
  modified_base 14: mod_base = OTHER; note = 2'-deoxy-2'-fluoro-uridine-3'-phosphate
  modified_base 15: mod_base = OTHER; note = 2'-O-methyl-adenosine-3'-phosphate
  modified_base 16: mod_base = OTHER; note = 2'-deoxy-2'-fluoro-guanosine-3'-phosphate
  modified_base 17: mod_base = OTHER; note = 2'-O-methyl-uridine-3'-phosphate
  modified_base 18: mod_base = OTHER; note = 2'-O-methyl-guanosine-3'-phosphate
  modified_base 19: mod_base = OTHER; note = 2'-O-methyl-adenosine-3'-phosphorothioate
  modified_base 20: mod_base = OTHER; note = 2'-O-methyl-uridine-3'-phosphorothioate
  modified_base 21: mod_base = OTHER; note = 2'-O-methyl-uridine-3'-phosphate
tttgttagtatattagtgatt

SEQ ID NO: 2394 - RNA, 21 nt, synthetic construct
  source 1..21: mol_type = other RNA
  modified_base 1: mod_base = OTHER; note = 2'-O-methyl-uridine-3'-phosphorothioate
  modified_base 2: mod_base = OTHER; note = 2'-deoxy-2'-fluoro-cytidine-3'-phosphorothioate
  modified_base 3: mod_base = OTHER; note = 2'-O-methyl-adenosine-3'-phosphate
  modified_base 4: mod_base = OTHER; note = 2'-O-methyl-guanosine-3'-phosphate
  modified_base 5: mod_base = OTHER; note = 2'-O-methyl-adenosine-3'-phosphate
  modified_base 6: mod_base = OTHER; note = 2'-deoxy-2'-fluoro-uridine-3'-phosphate
  modified_base 7: mod_base = OTHER; note = 2'-O-methyl-adenosine-3'-phosphate
  modified_base 8: mod_base = OTHER; note = 2'-deoxy-2'-fluoro-adenosine-3'-phosphate
  modified_base 9: mod_base = OTHER; note = 2'-deoxy-2'-fluoro-uridine-3'-phosphate
  modified_base 10: mod_base = OTHER; note = 2'-O-methyl-uridine-3'-phosphate
  modified_base 11: mod_base = OTHER; note = 2'-O-methyl-cytidine-3'-phosphate
  modified_base 12: mod_base = OTHER; note = 2'-O-methyl-adenosine-3'-phosphate
  modified_base 13: mod_base = OTHER; note = 2'-O-methyl-cytidine-3'-phosphate
  modified_base 14: mod_base = OTHER; note = 2'-deoxy-2'-fluoro-uridine-3'-phosphate
  modified_base 15: mod_base = OTHER; note = 2'-O-methyl-adenosine-3'-phosphate
  modified_base 16: mod_base = OTHER; note = 2'-deoxy-2'-fluoro-cytidine-3'-phosphate
  modified_base 17: mod_base = OTHER; note = 2'-O-methyl-adenosine-3'-phosphate
  modified_base 18: mod_base = OTHER; note = 2'-O-methyl-guanosine-3'-phosphate
  modified_base 19: mod_base = OTHER; note = 2'-O-methyl-uridine-3'-phosphorothioate
  modified_base 20: mod_base = OTHER; note = 2'-O-methyl-uridine-3'-phosphorothioate
  modified_base 21: mod_base = OTHER; note = 2'-O-methyl-uridine-3'-phosphate
tcagataattcactacagttt

SEQ ID NO: 2395 - RNA, 21 nt, synthetic construct
  source 1..21: mol_type = other RNA
  modified_base 1: mod_base = OTHER; note = 2'-O-methyl-uridine-3'-phosphorothioate
  modified_base 2: mod_base = OTHER; note = 2'-deoxy-2'-fluoro-uridine-3'-phosphorothioate
  modified_base 3: mod_base = OTHER; note = 2'-O-methyl-cytidine-3'-phosphate
  modified_base 4: mod_base = OTHER; note = 2'-O-methyl-adenosine-3'-phosphate
  modified_base 5: mod_base = OTHER; note = 2'-O-methyl-guanosine-3'-phosphate
  modified_base 6: mod_base = OTHER; note = 2'-deoxy-2'-fluoro-adenosine-3'-phosphate
  modified_base 7: mod_base = OTHER; note = 2'-O-methyl-uridine-3'-phosphate
  modified_base 8: mod_base = OTHER; note = 2'-deoxy-2'-fluoro-adenosine-3'-phosphate
  modified_base 9: mod_base = OTHER; note = 2'-deoxy-2'-fluoro-adenosine-3'-phosphate
  modified_base 10: mod_base = OTHER; note = 2'-O-methyl-uridine-3'-phosphate
  modified_base 11: mod_base = OTHER; note = 2'-O-methyl-uridine-3'-phosphate
  modified_base 12: mod_base = OTHER; note = 2'-O-methyl-cytidine-3'-phosphate
  modified_base 13: mod_base = OTHER; note = 2'-O-methyl-adenosine-3'-phosphate
  modified_base 14: mod_base = OTHER; note = 2'-deoxy-2'-fluoro-cytidine-3'-phosphate
  modified_base 15: mod_base = OTHER; note = 2'-O-methyl-uridine-3'-phosphate
  modified_base 16: mod_base = OTHER; note = 2'-deoxy-2'-fluoro-adenosine-3'-phosphate
  modified_base 17: mod_base = OTHER; note = 2'-O-methyl-cytidine-3'-phosphate
  modified_base 18: mod_base = OTHER; note = 2'-O-methyl-adenosine-3'-phosphate
  modified_base 19: mod_base = OTHER; note = 2'-O-methyl-guanosine-3'-phosphorothioate
  modified_base 20: mod_base = OTHER; note = 2'-O-methyl-uridine-3'-phosphorothioate
  modified_base 21: mod_base = OTHER; note = 2'-O-methyl-uridine-3'-phosphate
ttcagataattcactacagtt

SEQ ID NO: 2396 - RNA, 21 nt, synthetic construct
  source 1..21: mol_type = other RNA
  modified_base 1: mod_base = OTHER; note = 2'-O-methyl-uridine-3'-phosphorothioate
  modified_base 2: mod_base = OTHER; note = 2'-deoxy-2'-fluoro-uridine-3'-phosphorothioate
  modified_base 3: mod_base = OTHER; note = 2'-O-methyl-uridine-3'-phosphate
  modified_base 4: mod_base = OTHER; note = 2'-O-methyl-adenosine-3'-phosphate
  modified_base 5: mod_base = OTHER; note = 2'-O-methyl-adenosine-3'-phosphate
  modified_base 6: mod_base = OTHER; note = 2'-deoxy-2'-fluoro-guanosine-3'-phosphate
  modified_base 7: mod_base = OTHER; note = 2'-O-methyl-guanosine-3'-phosphate
  modified_base 8: mod_base = OTHER; note = 2'-deoxy-2'-fluoro-uridine-3'-phosphate
  modified_base 9: mod_base = OTHER; note = 2'-deoxy-2'-fluoro-uridine-3'-phosphate
  modified_base 10: mod_base = OTHER; note = 2'-O-methyl-uridine-3'-phosphate
  modified_base 11: mod_base = OTHER; note = 2'-O-methyl-cytidine-3'-phosphate
  modified_base 12: mod_base = OTHER; note = 2'-O-methyl-adenosine-3'-phosphate
  modified_base 13: mod_base = OTHER; note = 2'-O-methyl-uridine-3'-phosphate
  modified_base 14: mod_base = OTHER; note = 2'-deoxy-2'-fluoro-guanosine-3'-phosphate
  modified_base 15: mod_base = OTHER; note = 2'-O-methyl-adenosine-3'-phosphate
  modified_base 16: mod_base = OTHER; note = 2'-deoxy-2'-fluoro-uridine-3'-phosphate
  modified_base 17: mod_base = OTHER; note = 2'-O-methyl-uridine-3'-phosphate
  modified_base 18: mod_base = OTHER; note = 2'-O-methyl-cytidine-3'-phosphate
  modified_base 19: mod_base = OTHER; note = 2'-O-methyl-cytidine-3'-phosphorothioate
  modified_base 20: mod_base = OTHER; note = 2'-O-methyl-uridine-3'-phosphorothioate
  modified_base 21: mod_base = OTHER; note = 2'-O-methyl-uridine-3'-phosphate
tttaaggtttcatgattcctt

SEQ ID NO: 2397 - RNA, 21 nt, synthetic construct
  source 1..21: mol_type = other RNA
  modified_base 1: mod_base = OTHER; note = 2'-O-methyl-uridine-3'-phosphorothioate
  modified_base 2: mod_base = OTHER; note = 2'-deoxy-2'-fluoro-cytidine-3'-phosphorothioate
  modified_base 3: mod_base = OTHER; note = 2'-O-methyl-uridine-3'-phosphate
  modified_base 4: mod_base = OTHER; note = 2'-O-methyl-uridine-3'-phosphate
  modified_base 5: mod_base = OTHER; note = 2'-O-methyl-adenosine-3'-phosphate
  modified_base 6: mod_base = OTHER; note = 2'-deoxy-2'-fluoro-adenosine-3'-phosphate
  modified_base 7: mod_base = OTHER; note = 2'-O-methyl-guanosine-3'-phosphate
  modified_base 8: mod_base = OTHER; note = 2'-deoxy-2'-fluoro-guanosine-3'-phosphate
  modified_base 9: mod_base = OTHER; note = 2'-deoxy-2'-fluoro-uridine-3'-phosphate
  modified_base 10: mod_base = OTHER; note = 2'-O-methyl-uridine-3'-phosphate
  modified_base 11: mod_base = OTHER; note = 2'-O-methyl-uridine-3'-phosphate
  modified_base 12: mod_base = OTHER; note = 2'-O-methyl-cytidine-3'-phosphate
  modified_base 13: mod_base = OTHER; note = 2'-O-methyl-adenosine-3'-phosphate
  modified_base 14: mod_base = OTHER; note = 2'-deoxy-2'-fluoro-uridine-3'-phosphate
  modified_base 15: mod_base = OTHER; note = 2'-O-methyl-guanosine-3'-phosphate
  modified_base 16: mod_base = OTHER; note = 2'-deoxy-2'-fluoro-adenosine-3'-phosphate
  modified_base 17: mod_base = OTHER; note = 2'-O-methyl-uridine-3'-phosphate
  modified_base 18: mod_base = OTHER; note = 2'-O-methyl-uridine-3'-phosphate
  modified_base 19: mod_base = OTHER; note = 2'-O-methyl-cytidine-3'-phosphorothioate
  modified_base 20: mod_base = OTHER; note = 2'-O-methyl-uridine-3'-phosphorothioate
  modified_base 21: mod_base = OTHER; note = 2'-O-methyl-uridine-3'-phosphate
tcttaaggtttcatgattctt

SEQ ID NO: 2398 - RNA, 21 nt, synthetic construct
  source 1..21: mol_type = other RNA
  modified_base 1: mod_base = OTHER; note = 2'-O-methyl-uridine-3'-phosphorothioate
  modified_base 2: mod_base = OTHER; note = 2'-deoxy-2'-fluoro-uridine-3'-phosphorothioate
  modified_base 3: mod_base = OTHER; note = 2'-O-methyl-cytidine-3'-phosphate
  modified_base 4: mod_base = OTHER; note = 2'-O-methyl-uridine-3'-phosphate
  modified_base 5: mod_base = OTHER; note = 2'-O-methyl-uridine-3'-phosphate
  modified_base 6: mod_base = OTHER; note = 2'-deoxy-2'-fluoro-adenosine-3'-phosphate
  modified_base 7: mod_base = OTHER; note = 2'-O-methyl-adenosine-3'-phosphate
  modified_base 8: mod_base = OTHER; note = 2'-deoxy-2'-fluoro-guanosine-3'-phosphate
  modified_base 9: mod_base = OTHER; note = 2'-deoxy-2'-fluoro-guanosine-3'-phosphate
  modified_base 10: mod_base = OTHER; note = 2'-O-methyl-uridine-3'-phosphate
  modified_base 11: mod_base = OTHER; note = 2'-O-methyl-uridine-3'-phosphate
  modified_base 12: mod_base = OTHER; note = 2'-O-methyl-uridine-3'-phosphate
  modified_base 13: mod_base = OTHER; note = 2'-O-methyl-cytidine-3'-phosphate
  modified_base 14: mod_base = OTHER; note = 2'-deoxy-2'-fluoro-adenosine-3'-phosphate
  modified_base 15: mod_base = OTHER; note = 2'-O-methyl-uridine-3'-phosphate
  modified_base 16: mod_base = OTHER; note = 2'-deoxy-2'-fluoro-guanosine-3'-phosphate
  modified_base 17: mod_base = OTHER; note = 2'-O-methyl-adenosine-3'-phosphate
  modified_base 18: mod_base = OTHER; note = 2'-O-methyl-uridine-3'-phosphate
  modified_base 19: mod_base = OTHER; note = 2'-O-methyl-uridine-3'-phosphorothioate
  modified_base 20: mod_base = OTHER; note = 2'-O-methyl-uridine-3'-phosphorothioate
  modified_base 21: mod_base = OTHER; note = 2'-O-methyl-uridine-3'-phosphate
ttcttaaggtttcatgatttt

SEQ ID NO: 2399 - RNA, 21 nt, synthetic construct
  source 1..21: mol_type = other RNA
  modified_base 1: mod_base = OTHER; note = 2'-O-methyl-uridine-3'-phosphorothioate
  modified_base 2: mod_base = OTHER; note = 2'-deoxy-2'-fluoro-guanosine-3'-phosphorothioate
  modified_base 3: mod_base = OTHER; note = 2'-O-methyl-uridine-3'-phosphate
  modified_base 4: mod_base = OTHER; note = 2'-O-methyl-cytidine-3'-phosphate
  modified_base 5: mod_base = OTHER; note = 2'-O-methyl-uridine-3'-phosphate
  modified_base 6: mod_base = OTHER; note = 2'-deoxy-2'-fluoro-uridine-3'-phosphate
  modified_base 7: mod_base = OTHER; note = 2'-O-methyl-adenosine-3'-phosphate
  modified_base 8: mod_base = OTHER; note = 2'-deoxy-2'-fluoro-adenosine-3'-phosphate
  modified_base 9: mod_base = OTHER; note = 2'-deoxy-2'-fluoro-guanosine-3'-phosphate
  modified_base 10: mod_base = OTHER; note = 2'-O-methyl-guanosine-3'-phosphate
  modified_base 11: mod_base = OTHER; note = 2'-O-methyl-uridine-3'-phosphate
  modified_base 12: mod_base = OTHER; note = 2'-O-methyl-uridine-3'-phosphate
  modified_base 13: mod_base = OTHER; note = 2'-O-methyl-uridine-3'-phosphate
  modified_base 14: mod_base = OTHER; note = 2'-deoxy-2'-fluoro-cytidine-3'-phosphate
  modified_base 15: mod_base = OTHER; note = 2'-O-methyl-adenosine-3'-phosphate
  modified_base 16: mod_base = OTHER; note = 2'-deoxy-2'-fluoro-uridine-3'-phosphate
  modified_base 17: mod_base = OTHER; note = 2'-O-methyl-guanosine-3'-phosphate
  modified_base 18: mod_base = OTHER; note = 2'-O-methyl-adenosine-3'-phosphate
  modified_base 19: mod_base = OTHER; note = 2'-O-methyl-uridine-3'-phosphorothioate
  modified_base 20: mod_base = OTHER; note = 2'-O-methyl-uridine-3'-phosphorothioate
  modified_base 21: mod_base = OTHER; note = 2'-O-methyl-uridine-3'-phosphate
tgtcttaaggtttcatgattt

SEQ ID NO: 2400 - RNA, 21 nt, synthetic construct
  source 1..21: mol_type = other RNA
  modified_base 1: mod_base = OTHER; note = 2'-O-methyl-uridine-3'-phosphorothioate
  modified_base 2: mod_base = OTHER; note = 2'-deoxy-2'-fluoro-adenosine-3'-phosphorothioate
  modified_base 3: mod_base = OTHER; note = 2'-O-methyl-guanosine-3'-phosphate
  modified_base 4: mod_base = OTHER; note = 2'-O-methyl-uridine-3'-phosphate
  modified_base 5: mod_base = OTHER; note = 2'-O-methyl-cytidine-3'-phosphate
  modified_base 6: mod_base = OTHER; note = 2'-deoxy-2'-fluoro-uridine-3'-phosphate
  modified_base 7: mod_base = OTHER; note = 2'-O-methyl-uridine-3'-phosphate
  modified_base 8: mod_base = OTHER; note = 2'-deoxy-2'-fluoro-adenosine-3'-phosphate
  modified_base 9: mod_base = OTHER; note = 2'-deoxy-2'-fluoro-adenosine-3'-phosphate
  modified_base 10: mod_base = OTHER; note = 2'-O-methyl-guanosine-3'-phosphate
  modified_base 11: mod_base = OTHER; note = 2'-O-methyl-guanosine-3'-phosphate
  modified_base 12: mod_base = OTHER; note = 2'-O-methyl-uridine-3'-phosphate
  modified_base 13: mod_base = OTHER; note = 2'-O-methyl-uridine-3'-phosphate
  modified_base 14: mod_base = OTHER; note = 2'-deoxy-2'-fluoro-uridine-3'-phosphate
  modified_base 15: mod_base = OTHER; note = 2'-O-methyl-cytidine-3'-phosphate
  modified_base 16: mod_base = OTHER; note = 2'-deoxy-2'-fluoro-adenosine-3'-phosphate
  modified_base 17: mod_base = OTHER; note = 2'-O-methyl-uridine-3'-phosphate
  modified_base 18: mod_base = OTHER; note = 2'-O-methyl-guanosine-3'-phosphate
  modified_base 19: mod_base = OTHER; note = 2'-O-methyl-adenosine-3'-phosphorothioate
  modified_base 20: mod_base = OTHER; note = 2'-O-methyl-uridine-3'-phosphorothioate
  modified_base 21: mod_base = OTHER; note = 2'-O-methyl-uridine-3'-phosphate
tagtcttaaggtttcatgatt

SEQ ID NO: 2401 - RNA, 21 nt, synthetic construct
  source 1..21: mol_type = other RNA
  modified_base 1: mod_base = OTHER; note = 2'-O-methyl-uridine-3'-phosphorothioate
  modified_base 2: mod_base = OTHER; note = 2'-deoxy-2'-fluoro-adenosine-3'-phosphorothioate
  modified_base 3: mod_base = OTHER; note = 2'-O-methyl-adenosine-3'-phosphate
  modified_base 4: mod_base = OTHER; note = 2'-O-methyl-guanosine-3'-phosphate
  modified_base 5: mod_base = OTHER; note = 2'-O-methyl-uridine-3'-phosphate
  modified_base 6: mod_base = OTHER; note = 2'-deoxy-2'-fluoro-cytidine-3'-phosphate
  modified_base 7: mod_base = OTHER; note = 2'-O-methyl-uridine-3'-phosphate
  modified_base 8: mod_base = OTHER; note = 2'-deoxy-2'-fluoro-uridine-3'-phosphate
  modified_base 9: mod_base = OTHER; note = 2'-deoxy-2'-fluoro-adenosine-3'-phosphate
  modified_base 10: mod_base = OTHER; note = 2'-O-methyl-adenosine-3'-phosphate
  modified_base 11: mod_base = OTHER; note = 2'-O-methyl-guanosine-3'-phosphate
  modified_base 12: mod_base = OTHER; note = 2'-O-methyl-guanosine-3'-phosphate
  modified_base 13: mod_base = OTHER; note = 2'-O-methyl-uridine-3'-phosphate
  modified_base 14: mod_base = OTHER; note = 2'-deoxy-2'-fluoro-uridine-3'-phosphate
  modified_base 15: mod_base = OTHER; note = 2'-O-methyl-uridine-3'-phosphate
  modified_base 16: mod_base = OTHER; note = 2'-deoxy-2'-fluoro-cytidine-3'-phosphate
  modified_base 17: mod_base = OTHER; note = 2'-O-methyl-adenosine-3'-phosphate
  modified_base 18: mod_base = OTHER; note = 2'-O-methyl-uridine-3'-phosphate
  modified_base 19: mod_base = OTHER; note = 2'-O-methyl-guanosine-3'-phosphorothioate
  modified_base 20: mod_base = OTHER; note = 2'-O-methyl-uridine-3'-phosphorothioate
  modified_base 21: mod_base = OTHER; note = 2'-O-methyl-uridine-3'-phosphate
taagtcttaaggtttcatgtt

SEQ ID NO: 2402 - RNA, 21 nt, synthetic construct
  source 1..21: mol_type = other RNA
  modified_base 1: mod_base = OTHER; note = 2'-O-methyl-uridine-3'-phosphorothioate
  modified_base 2: mod_base = OTHER; note = 2'-deoxy-2'-fluoro-cytidine-3'-phosphorothioate
  modified_base 3: mod_base = OTHER; note = 2'-O-methyl-uridine-3'-phosphate
  modified_base 4: mod_base = OTHER; note = 2'-O-methyl-guanosine-3'-phosphate
  modified_base 5: mod_base = OTHER; note = 2'-O-methyl-adenosine-3'-phosphate
  modified_base 6: mod_base = OTHER; note = 2'-deoxy-2'-fluoro-adenosine-3'-phosphate
  modified_base 7: mod_base = OTHER; note = 2'-O-methyl-guanosine-3'-phosphate
  modified_base 8: mod_base = OTHER; note = 2'-deoxy-2'-fluoro-uridine-3'-phosphate
  modified_base 9: mod_base = OTHER; note = 2'-deoxy-2'-fluoro-cytidine-3'-phosphate
  modified_base 10: mod_base = OTHER; note = 2'-O-methyl-uridine-3'-phosphate
  modified_base 11: mod_base = OTHER; note = 2'-O-methyl-uridine-3'-phosphate
  modified_base 12: mod_base = OTHER; note = 2'-O-methyl-adenosine-3'-phosphate
  modified_base 13: mod_base = OTHER; note = 2'-O-methyl-adenosine-3'-phosphate
  modified_base 14: mod_base = OTHER; note = 2'-deoxy-2'-fluoro-guanosine-3'-phosphate
  modified_base 15: mod_base = OTHER; note = 2'-O-methyl-guanosine-3'-phosphate
  modified_base 16: mod_base = OTHER; note = 2'-deoxy-2'-fluoro-uridine-3'-phosphate
  modified_base 17: mod_base = OTHER; note = 2'-O-methyl-uridine-3'-phosphate
  modified_base 18: mod_base = OTHER; note = 2'-O-methyl-uridine-3'-phosphate
  modified_base 19: mod_base = OTHER; note = 2'-O-methyl-cytidine-3'-phosphorothioate
  modified_base 20: mod_base = OTHER; note = 2'-O-methyl-uridine-3'-phosphorothioate
  modified_base 21: mod_base = OTHER; note = 2'-O-methyl-uridine-3'-phosphate
tctgaagtcttaaggtttctt

SEQ ID NO: 2403 - RNA, 21 nt, synthetic construct
  source 1..21: mol_type = other RNA
  modified_base 1: mod_base = OTHER; note = 2'-O-methyl-uridine-3'-phosphorothioate
  modified_base 2: mod_base = OTHER; note = 2'-deoxy-2'-fluoro-uridine-3'-phosphorothioate
  modified_base 3: mod_base = OTHER; note = 2'-O-methyl-cytidine-3'-phosphate
  modified_base 4: mod_base = OTHER; note = 2'-O-methyl-uridine-3'-phosphate
  modified_base 5: mod_base = OTHER; note = 2'-O-methyl-guanosine-3'-phosphate
  modified_base 6: mod_base = OTHER; note = 2'-deoxy-2'-fluoro-adenosine-3'-phosphate
  modified_base 7: mod_base = OTHER; note = 2'-O-methyl-adenosine-3'-phosphate
  modified_base 8: mod_base = OTHER; note = 2'-deoxy-2'-fluoro-guanosine-3'-phosphate
  modified_base 9: mod_base = OTHER; note = 2'-deoxy-2'-fluoro-uridine-3'-phosphate
  modified_base 10: mod_base = OTHER; note = 2'-O-methyl-cytidine-3'-phosphate
  modified_base 11: mod_base = OTHER; note = 2'-O-methyl-uridine-3'-phosphate
  modified_base 12: mod_base = OTHER; note = 2'-O-methyl-uridine-3'-phosphate
  modified_base 13: mod_base = OTHER; note = 2'-O-methyl-adenosine-3'-phosphate
  modified_base 14: mod_base = OTHER; note = 2'-deoxy-2'-fluoro-adenosine-3'-phosphate
  modified_base 15: mod_base = OTHER; note = 2'-O-methyl-guanosine-3'-phosphate
  modified_base 16: mod_base = OTHER; note = 2'-deoxy-2'-fluoro-guanosine-3'-phosphate
  modified_base 17: mod_base = OTHER; note = 2'-O-methyl-uridine-3'-phosphate
  modified_base 18: mod_base = OTHER; note = 2'-O-methyl-uridine-3'-phosphate
  modified_base 19: mod_base = OTHER; note = 2'-O-methyl-uridine-3'-phosphorothioate
  modified_base 20: mod_base = OTHER; note = 2'-O-methyl-uridine-3'-phosphorothioate
  modified_base 21: mod_base = OTHER; note = 2'-O-methyl-uridine-3'-phosphate
ttctgaagtcttaaggttttt

SEQ ID NO: 2404 - RNA, 21 nt, synthetic construct
  source 1..21: mol_type = other RNA
  modified_base 1: mod_base = OTHER; note = 2'-O-methyl-uridine-3'-phosphorothioate
  modified_base 2: mod_base = OTHER; note = 2'-deoxy-2'-fluoro-guanosine-3'-phosphorothioate
  modified_base 3: mod_base = OTHER; note = 2'-O-methyl-adenosine-3'-phosphate
  modified_base 4: mod_base = OTHER; note = 2'-O-methyl-adenosine-3'-phosphate
  modified_base 5: mod_base = OTHER; note = 2'-O-methyl-uridine-3'-phosphate
  modified_base 6: mod_base = OTHER; note = 2'-deoxy-2'-fluoro-guanosine-3'-phosphate
  modified_base 7: mod_base = OTHER; note = 2'-O-methyl-guanosine-3'-phosphate
  modified_base 8: mod_base = OTHER; note = 2'-deoxy-2'-fluoro-adenosine-3'-phosphate
  modified_base 9: mod_base = OTHER; note = 2'-deoxy-2'-fluoro-adenosine-3'-phosphate
  modified_base 10: mod_base = OTHER; note = 2'-O-methyl-guanosine-3'-phosphate
  modified_base 11: mod_base = OTHER; note = 2'-O-methyl-adenosine-3'-phosphate
  modified_base 12: mod_base = OTHER; note = 2'-O-methyl-cytidine-3'-phosphate
  modified_base 13: mod_base = OTHER; note = 2'-O-methyl-adenosine-3'-phosphate
  modified_base 14: mod_base = OTHER; note = 2'-deoxy-2'-fluoro-adenosine-3'-phosphate
  modified_base 15: mod_base = OTHER; note = 2'-O-methyl-cytidine-3'-phosphate
  modified_base 16: mod_base = OTHER; note = 2'-deoxy-2'-fluoro-cytidine-3'-phosphate
  modified_base 17: mod_base = OTHER; note = 2'-O-methyl-uridine-3'-phosphate
  modified_base 18: mod_base = OTHER; note = 2'-O-methyl-guanosine-3'-phosphate
  modified_base 19: mod_base = OTHER; note = 2'-O-methyl-cytidine-3'-phosphorothioate
  modified_base 20: mod_base = OTHER; note = 2'-O-methyl-uridine-3'-phosphorothioate
  modified_base 21: mod_base = OTHER; note = 2'-O-methyl-uridine-3'-phosphate
tgaatggaagacaacctgctt

SEQ ID NO: 2405 - RNA, 21 nt, synthetic construct
  source 1..21: mol_type = other RNA
  modified_base 1: mod_base = OTHER; note = 2'-O-methyl-uridine-3'-phosphorothioate
  modified_base 2: mod_base = OTHER; note = 2'-deoxy-2'-fluoro-guanosine-3'-phosphorothioate
  modified_base 3: mod_base = OTHER; note = 2'-O-methyl-guanosine-3'-phosphate
  modified_base 4: mod_base = OTHER; note = 2'-O-methyl-adenosine-3'-phosphate
  modified_base 5: mod_base = OTHER; note = 2'-O-methyl-adenosine-3'-phosphate
  modified_base 6: mod_base = OTHER; note = 2'-deoxy-2'-fluoro-uridine-3'-phosphate
  modified_base 7: mod_base = OTHER; note = 2'-O-methyl-guanosine-3'-phosphate
  modified_base 8: mod_base = OTHER; note = 2'-deoxy-2'-fluoro-guanosine-3'-phosphate
  modified_base 9: mod_base = OTHER; note = 2'-deoxy-2'-fluoro-adenosine-3'-phosphate
  modified_base 10: mod_base = OTHER; note = 2'-O-methyl-adenosine-3'-phosphate
  modified_base 11: mod_base = OTHER; note = 2'-O-methyl-guanosine-3'-phosphate
  modified_base 12: mod_base = OTHER; note = 2'-O-methyl-adenosine-3'-phosphate
  modified_base 13: mod_base = OTHER; note = 2'-O-methyl-cytidine-3'-phosphate
  modified_base 14: mod_base = OTHER; note = 2'-deoxy-2'-fluoro-adenosine-3'-phosphate
  modified_base 15: mod_base = OTHER; note = 2'-O-methyl-adenosine-3'-phosphate
  modified_base 16: mod_base = OTHER; note = 2'-deoxy-2'-fluoro-cytidine-3'-phosphate
  modified_base 17: mod_base = OTHER; note = 2'-O-methyl-cytidine-3'-phosphate
  modified_base 18: mod_base = OTHER; note = 2'-O-methyl-uridine-3'-phosphate
  modified_base 19: mod_base = OTHER; note = 2'-O-methyl-guanosine-3'-phosphorothioate
  modified_base 20: mod_base = OTHER; note = 2'-O-methyl-uridine-3'-phosphorothioate
  modified_base 21: mod_base = OTHER; note = 2'-O-methyl-uridine-3'-phosphate
tggaatggaagacaacctgtt

SEQ ID NO: 2406 - RNA, 21 nt, synthetic construct
  source 1..21: mol_type = other RNA
  modified_base 1: mod_base = OTHER; note = 2'-O-methyl-uridine-3'-phosphorothioate
  modified_base 2: mod_base = OTHER; note = 2'-deoxy-2'-fluoro-uridine-3'-phosphorothioate
  modified_base 3: mod_base = OTHER; note = 2'-O-methyl-guanosine-3'-phosphate
  modified_base 4: mod_base = OTHER; note = 2'-O-methyl-guanosine-3'-phosphate
  modified_base 5: mod_base = OTHER; note = 2'-O-methyl-adenosine-3'-phosphate
  modified_base 6: mod_base = OTHER; note = 2'-deoxy-2'-fluoro-adenosine-3'-phosphate
  modified_base 7: mod_base = OTHER; note = 2'-O-methyl-uridine-3'-phosphate
  modified_base 8: mod_base = OTHER; note = 2'-deoxy-2'-fluoro-guanosine-3'-phosphate
  modified_base 9: mod_base = OTHER; note = 2'-deoxy-2'-fluoro-guanosine-3'-phosphate
  modified_base 10: mod_base = OTHER; note = 2'-O-methyl-adenosine-3'-phosphate
  modified_base 11: mod_base = OTHER; note = 2'-O-methyl-adenosine-3'-phosphate
  modified_base 12: mod_base = OTHER; note = 2'-O-methyl-guanosine-3'-phosphate
  modified_base 13: mod_base = OTHER; note = 2'-O-methyl-adenosine-3'-phosphate
  modified_base 14: mod_base = OTHER; note = 2'-deoxy-2'-fluoro-cytidine-3'-phosphate
  modified_base 15: mod_base = OTHER; note = 2'-O-methyl-adenosine-3'-phosphate
  modified_base 16: mod_base = OTHER; note = 2'-deoxy-2'-fluoro-adenosine-3'-phosphate
  modified_base 17: mod_base = OTHER; note = 2'-O-methyl-cytidine-3'-phosphate
  modified_base 18: mod_base = OTHER; note = 2'-O-methyl-cytidine-3'-phosphate
  modified_base 19: mod_base = OTHER; note = 2'-O-methyl-uridine-3'-phosphorothioate
  modified_base 20: mod_base = OTHER; note = 2'-O-methyl-uridine-3'-phosphorothioate
  modified_base 21: mod_base = OTHER; note = 2'-O-methyl-uridine-3'-phosphate
ttggaatggaagacaaccttt

SEQ ID NO: 2407 - RNA, 21 nt, synthetic construct
  source 1..21: mol_type = other RNA
  modified_base 1: mod_base = OTHER; note = 2'-O-methyl-uridine-3'-phosphorothioate
  modified_base 2: mod_base = OTHER; note = 2'-deoxy-2'-fluoro-cytidine-3'-phosphorothioate
  modified_base 3: mod_base = OTHER; note = 2'-O-methyl-uridine-3'-phosphate
  modified_base 4: mod_base = OTHER; note = 2'-O-methyl-guanosine-3'-phosphate
  modified_base 5: mod_base = OTHER; note = 2'-O-methyl-cytidine-3'-phosphate
  modified_base 6: mod_base = OTHER; note = 2'-deoxy-2'-fluoro-adenosine-3'-phosphate
  modified_base 7: mod_base = OTHER; note = 2'-O-methyl-uridine-3'-phosphate
  modified_base 8: mod_base = OTHER; note = 2'-deoxy-2'-fluoro-uridine-3'-phosphate
  modified_base 9: mod_base = OTHER; note = 2'-deoxy-2'-fluoro-guanosine-3'-phosphate
  modified_base 10: mod_base = OTHER; note = 2'-O-methyl-guanosine-3'-phosphate
  modified_base 11: mod_base = OTHER; note = 2'-O-methyl-adenosine-3'-phosphate
  modified_base 12: mod_base = OTHER; note = 2'-O-methyl-uridine-3'-phosphate
  modified_base 13: mod_base = OTHER; note = 2'-O-methyl-guanosine-3'-phosphate
  modified_base 14: mod_base = OTHER; note = 2'-deoxy-2'-fluoro-uridine-3'-phosphate
  modified_base 15: mod_base = OTHER; note = 2'-O-methyl-uridine-3'-phosphate
  modified_base 16: mod_base = OTHER; note = 2'-deoxy-2'-fluoro-adenosine-3'-phosphate
  modified_base 17: mod_base = OTHER; note = 2'-O-methyl-guanosine-3'-phosphate
  modified_base 18: mod_base = OTHER; note = 2'-O-methyl-guanosine-3'-phosphate
  modified_base 19: mod_base = OTHER; note = 2'-O-methyl-cytidine-3'-phosphorothioate
  modified_base 20: mod_base = OTHER; note = 2'-O-methyl-uridine-3'-phosphorothioate
  modified_base 21: mod_base = OTHER; note = 2'-O-methyl-uridine-3'-phosphate
tctgcattggatgttaggctt

SEQ ID NO: 2408 - RNA, 21 nt, synthetic construct
  source 1..21: mol_type = other RNA
  modified_base 1: mod_base = OTHER; note = 2'-O-methyl-uridine-3'-phosphorothioate
  modified_base 2: mod_base = OTHER; note = 2'-deoxy-2'-fluoro-cytidine-3'-phosphorothioate
  modified_base 3: mod_base = OTHER; note = 2'-O-methyl-cytidine-3'-phosphate
  modified_base 4: mod_base = OTHER; note = 2'-O-methyl-uridine-3'-phosphate
  modified_base 5: mod_base = OTHER; note = 2'-O-methyl-guanosine-3'-phosphate
  modified_base 6: mod_base = OTHER; note = 2'-deoxy-2'-fluoro-cytidine-3'-phosphate
  modified_base 7: mod_base = OTHER; note = 2'-O-methyl-adenosine-3'-phosphate
  modified_base 8: mod_base = OTHER; note = 2'-deoxy-2'-fluoro-uridine-3'-phosphate
  modified_base 9: mod_base = OTHER; note = 2'-deoxy-2'-fluoro-uridine-3'-phosphate
  modified_base 10: mod_base = OTHER; note = 2'-O-methyl-guanosine-3'-phosphate
  modified_base 11: mod_base = OTHER; note = 2'-O-methyl-guanosine-3'-phosphate
  modified_base 12: mod_base = OTHER; note = 2'-O-methyl-adenosine-3'-phosphate
  modified_base 13: mod_base = OTHER; note = 2'-O-methyl-uridine-3'-phosphate
  modified_base 14: mod_base = OTHER; note = 2'-deoxy-2'-fluoro-guanosine-3'-phosphate
  modified_base 15: mod_base = OTHER; note = 2'-O-methyl-uridine-3'-phosphate
  modified_base 16: mod_base = OTHER; note = 2'-deoxy-2'-fluoro-uridine-3'-phosphate
  modified_base 17: mod_base = OTHER; note = 2'-O-methyl-adenosine-3'-phosphate
  modified_base 18: mod_base = OTHER; note = 2'-O-methyl-guanosine-3'-phosphate
  modified_base 19: mod_base = OTHER; note = 2'-O-methyl-guanosine-3'-phosphorothioate
  modified_base 20: mod_base = OTHER; note = 2'-O-methyl-uridine-3'-phosphorothioate
  modified_base 21: mod_base = OTHER; note = 2'-O-methyl-uridine-3'-phosphate
tcctgcattggatgttaggtt

SEQ ID NO: 2409 - RNA, 21 nt, synthetic construct
  source 1..21: mol_type = other RNA
  modified_base 1: mod_base = OTHER; note = 2'-O-methyl-uridine-3'-phosphorothioate
  modified_base 2: mod_base = OTHER; note = 2'-deoxy-2'-fluoro-guanosine-3'-phosphorothioate
  modified_base 3: mod_base = OTHER; note = 2'-O-methyl-cytidine-3'-phosphate
  modified_base 4: mod_base = OTHER; note = 2'-O-methyl-cytidine-3'-phosphate
  modified_base 5: mod_base = OTHER; note = 2'-O-methyl-uridine-3'-phosphate
  modified_base 6: mod_base = OTHER; note = 2'-deoxy-2'-fluoro-guanosine-3'-phosphate
  modified_base 7: mod_base = OTHER; note = 2'-O-methyl-cytidine-3'-phosphate
  modified_base 8: mod_base = OTHER; note = 2'-deoxy-2'-fluoro-adenosine-3'-phosphate
  modified_base 9: mod_base = OTHER; note = 2'-deoxy-2'-fluoro-uridine-3'-phosphate
  modified_base 10: mod_base = OTHER; note = 2'-O-methyl-uridine-3'-phosphate
  modified_base 11: mod_base = OTHER; note = 2'-O-methyl-guanosine-3'-phosphate
  modified_base 12: mod_base = OTHER; note = 2'-O-methyl-guanosine-3'-phosphate
  modified_base 13: mod_base = OTHER; note = 2'-O-methyl-adenosine-3'-phosphate
  modified_base 14: mod_base = OTHER; note = 2'-deoxy-2'-fluoro-uridine-3'-phosphate
  modified_base 15: mod_base = OTHER; note = 2'-O-methyl-guanosine-3'-phosphate
  modified_base 16: mod_base = OTHER; note = 2'-deoxy-2'-fluoro-uridine-3'-phosphate
  modified_base 17: mod_base = OTHER; note = 2'-O-methyl-uridine-3'-phosphate
  modified_base 18: mod_base = OTHER; note = 2'-O-methyl-adenosine-3'-phosphate
  modified_base 19: mod_base = OTHER; note = 2'-O-methyl-guanosine-3'-phosphorothioate
  modified_base 20: mod_base = OTHER; note = 2'-O-methyl-uridine-3'-phosphorothioate
  modified_base 21: mod_base = OTHER; note = 2'-O-methyl-uridine-3'-phosphate
tgcctgcattggatgttagtt

SEQ ID NO: 2410 - RNA, 21 nt, synthetic construct
  source 1..21: mol_type = other RNA
  modified_base 1: mod_base = OTHER; note = 2'-O-methyl-uridine-3'-phosphorothioate
  modified_base 2: mod_base = OTHER; note = 2'-deoxy-2'-fluoro-uridine-3'-phosphorothioate
  modified_base 3: mod_base = OTHER; note = 2'-O-methyl-guanosine-3'-phosphate
  modified_base 4: mod_base = OTHER; note = 2'-O-methyl-cytidine-3'-phosphate
  modified_base 5: mod_base = OTHER; note = 2'-O-methyl-cytidine-3'-phosphate
  modified_base 6: mod_base = OTHER; note = 2'-deoxy-2'-fluoro-uridine-3'-phosphate
  modified_base 7: mod_base = OTHER; note = 2'-O-methyl-guanosine-3'-phosphate
  modified_base 8: mod_base = OTHER; note = 2'-deoxy-2'-fluoro-cytidine-3'-phosphate
  modified_base 9: mod_base = OTHER; note = 2'-deoxy-2'-fluoro-adenosine-3'-phosphate
  modified_base 10: mod_base = OTHER; note = 2'-O-methyl-uridine-3'-phosphate
  modified_base 11: mod_base = OTHER; note = 2'-O-methyl-uridine-3'-phosphate
  modified_base 12: mod_base = OTHER; note = 2'-O-methyl-guanosine-3'-phosphate
  modified_base 13: mod_base = OTHER; note = 2'-O-methyl-guanosine-3'-phosphate
  modified_base 14: mod_base = OTHER; note = 2'-deoxy-2'-fluoro-adenosine-3'-phosphate
  modified_base 15: mod_base = OTHER; note = 2'-O-methyl-uridine-3'-phosphate
  modified_base 16: mod_base = OTHER; note = 2'-deoxy-2'-fluoro-guanosine-3'-phosphate
  modified_base 17: mod_base = OTHER; note = 2'-O-methyl-uridine-3'-phosphate
  modified_base 18: mod_base = OTHER; note = 2'-O-methyl-uridine-3'-phosphate
  modified_base 19: mod_base = OTHER; note = 2'-O-methyl-adenosine-3'-phosphorothioate
  modified_base 20: mod_base = OTHER; note = 2'-O-methyl-uridine-3'-phosphorothioate
  modified_base 21: mod_base = OTHER; note = 2'-O-methyl-uridine-3'-phosphate
ttgcctgcattggatgttatt

SEQ ID NO: 2411 - RNA, 21 nt, synthetic construct
  source 1..21: mol_type = other RNA
  modified_base 1: mod_base = OTHER; note = 2'-O-methyl-uridine-3'-phosphorothioate
  modified_base 2: mod_base = OTHER; note = 2'-deoxy-2'-fluoro-uridine-3'-phosphorothioate
  modified_base 3: mod_base = OTHER; note = 2'-O-methyl-uridine-3'-phosphate
  modified_base 4: mod_base = OTHER; note = 2'-O-methyl-guanosine-3'-phosphate
  modified_base 5: mod_base = OTHER; note = 2'-O-methyl-cytidine-3'-phosphate
  modified_base 6: mod_base = OTHER; note = 2'-deoxy-2'-fluoro-cytidine-3'-phosphate
  modified_base 7: mod_base = OTHER; note = 2'-O-methyl-uridine-3'-phosphate
  modified_base 8: mod_base = OTHER; note = 2'-deoxy-2'-fluoro-guanosine-3'-phosphate
  modified_base 9: mod_base = OTHER; note = 2'-deoxy-2'-fluoro-cytidine-3'-phosphate
  modified_base 10: mod_base = OTHER; note = 2'-O-methyl-adenosine-3'-phosphate
  modified_base 11: mod_base = OTHER; note = 2'-O-methyl-uridine-3'-phosphate
  modified_base 12: mod_base = OTHER; note = 2'-O-methyl-uridine-3'-phosphate
  modified_base 13: mod_base = OTHER; note = 2'-O-methyl-guanosine-3'-phosphate
  modified_base 14: mod_base = OTHER; note = 2'-deoxy-2'-fluoro-guanosine-3'-phosphate
  modified_base 15: mod_base = OTHER; note = 2'-O-methyl-adenosine-3'-phosphate
  modified_base 16: mod_base = OTHER; note = 2'-deoxy-2'-fluoro-uridine-3'-phosphate
  modified_base 17: mod_base = OTHER; note = 2'-O-methyl-guanosine-3'-phosphate
  modified_base 18: mod_base = OTHER; note = 2'-O-methyl-uridine-3'-phosphate
  modified_base 19: mod_base = OTHER; note = 2'-O-methyl-uridine-3'-phosphorothioate
  modified_base 20: mod_base = OTHER; note = 2'-O-methyl-uridine-3'-phosphorothioate
  modified_base 21: mod_base = OTHER; note = 2'-O-methyl-uridine-3'-phosphate
tttgcctgcattggatgtttt

SEQ ID NO: 2412 - RNA, 21 nt, synthetic construct
  source 1..21: mol_type = other RNA
  modified_base 1: mod_base = OTHER; note = 2'-O-methyl-uridine-3'-phosphorothioate
  modified_base 2: mod_base = OTHER; note = 2'-deoxy-2'-fluoro-cytidine-3'-phosphorothioate
  modified_base 3: mod_base = OTHER; note = 2'-O-methyl-uridine-3'-phosphate
  modified_base 4: mod_base = OTHER; note = 2'-O-methyl-uridine-3'-phosphate
  modified_base 5: mod_base = OTHER; note = 2'-O-methyl-guanosine-3'-phosphate
  modified_base 6: mod_base = OTHER; note = 2'-deoxy-2'-fluoro-cytidine-3'-phosphate
  modified_base 7: mod_base = OTHER; note = 2'-O-methyl-cytidine-3'-phosphate
  modified_base 8: mod_base = OTHER; note = 2'-deoxy-2'-fluoro-uridine-3'-phosphate
  modified_base 9: mod_base = OTHER; note = 2'-deoxy-2'-fluoro-guanosine-3'-phosphate
  modified_base 10: mod_base = OTHER; note = 2'-O-methyl-cytidine-3'-phosphate
  modified_base 11: mod_base = OTHER; note = 2'-O-methyl-adenosine-3'-phosphate
  modified_base 12: mod_base = OTHER; note = 2'-O-methyl-uridine-3'-phosphate
  modified_base 13: mod_base = OTHER; note = 2'-O-methyl-uridine-3'-phosphate
  modified_base 14: mod_base = OTHER; note = 2'-deoxy-2'-fluoro-guanosine-3'-phosphate
  modified_base 15: mod_base = OTHER; note = 2'-O-methyl-guanosine-3'-phosphate
  modified_base 16: mod_base = OTHER; note = 2'-deoxy-2'-fluoro-adenosine-3'-phosphate
  modified_base 17: mod_base = OTHER; note = 2'-O-methyl-uridine-3'-phosphate
  modified_base 18: mod_base = OTHER; note = 2'-O-methyl-guanosine-3'-phosphate
  modified_base 19: mod_base = OTHER; note = 2'-O-methyl-uridine-3'-phosphorothioate
  modified_base 20: mod_base = OTHER; note = 2'-O-methyl-uridine-3'-phosphorothioate
  modified_base 21: mod_base = OTHER; note = 2'-O-methyl-uridine-3'-phosphate
tcttgcctgcattggatgttt

SEQ ID NO: 2413 - RNA, 21 nt, synthetic construct
  source 1..21: mol_type = other RNA
  modified_base 1: mod_base = OTHER; note = 2'-O-methyl-uridine-3'-phosphorothioate
  modified_base 2: mod_base = OTHER; note = 2'-deoxy-2'-fluoro-cytidine-3'-phosphorothioate
  modified_base 3: mod_base = OTHER; note = 2'-O-methyl-cytidine-3'-phosphate
  modified_base 4: mod_base = OTHER; note = 2'-O-methyl-uridine-3'-phosphate
  modified_base 5: mod_base = OTHER; note = 2'-O-methyl-uridine-3'-phosphate
  modified_base 6: mod_base = OTHER; note = 2'-deoxy-2'-fluoro-guanosine-3'-phosphate
  modified_base 7: mod_base = OTHER; note = 2'-O-methyl-cytidine-3'-phosphate
  modified_base 8: mod_base = OTHER; note = 2'-deoxy-2'-fluoro-cytidine-3'-phosphate
  modified_base 9: mod_base = OTHER; note = 2'-deoxy-2'-fluoro-uridine-3'-phosphate
  modified_base 10: mod_base = OTHER; note = 2'-O-methyl-guanosine-3'-phosphate
  modified_base 11: mod_base = OTHER; note = 2'-O-methyl-cytidine-3'-phosphate
  modified_base 12: mod_base = OTHER; note = 2'-O-methyl-adenosine-3'-phosphate
  modified_base 13: mod_base = OTHER; note = 2'-O-methyl-uridine-3'-phosphate
  modified_base 14: mod_base = OTHER; note = 2'-deoxy-2'-fluoro-uridine-3'-phosphate
  modified_base 15: mod_base = OTHER; note = 2'-O-methyl-guanosine-3'-phosphate
  modified_base 16: mod_base = OTHER; note = 2'-deoxy-2'-fluoro-guanosine-3'-phosphate
  modified_base 17: mod_base = OTHER; note = 2'-O-methyl-adenosine-3'-phosphate
  modified_base 18: mod_base = OTHER; note = 2'-O-methyl-uridine-3'-phosphate
  modified_base 19: mod_base = OTHER; note = 2'-O-methyl-guanosine-3'-phosphorothioate
  modified_base 20: mod_base = OTHER; note = 2'-O-methyl-uridine-3'-phosphorothioate
  modified_base 21: mod_base = OTHER; note = 2'-O-methyl-uridine-3'-phosphate
tccttgcctgcattggatgtt

SEQ ID NO: 2414 - RNA, 21 nt, synthetic construct
  source 1..21: mol_type = other RNA
  modified_base 1: mod_base = OTHER; note = 2'-O-methyl-uridine-3'-phosphorothioate
  modified_base 2: mod_base = OTHER; note = 2'-deoxy-2'-fluoro-uridine-3'-phosphorothioate
  modified_base 3: mod_base = OTHER; note = 2'-O-methyl-cytidine-3'-phosphate
  modified_base 4: mod_base = OTHER; note = 2'-O-methyl-cytidine-3'-phosphate
  modified_base 5: mod_base = OTHER; note = 2'-O-methyl-uridine-3'-phosphate
  modified_base 6: mod_base = OTHER; note = 2'-deoxy-2'-fluoro-uridine-3'-phosphate
  modified_base 7: mod_base = OTHER; note = 2'-O-methyl-guanosine-3'-phosphate
  modified_base 8: mod_base = OTHER; note = 2'-deoxy-2'-fluoro-cytidine-3'-phosphate
  modified_base 9: mod_base = OTHER; note = 2'-deoxy-2'-fluoro-cytidine-3'-phosphate
  modified_base 10: mod_base = OTHER; note = 2'-O-methyl-uridine-3'-phosphate
  modified_base 11: mod_base = OTHER; note = 2'-O-methyl-guanosine-3'-phosphate
  modified_base 12: mod_base = OTHER; note = 2'-O-methyl-cytidine-3'-phosphate
  modified_base 13: mod_base = OTHER; note = 2'-O-methyl-adenosine-3'-phosphate
  modified_base 14: mod_base = OTHER; note = 2'-deoxy-2'-fluoro-uridine-3'-phosphate
  modified_base 15: mod_base = OTHER; note = 2'-O-methyl-uridine-3'-phosphate
  modified_base 16: mod_base = OTHER; note = 2'-deoxy-2'-fluoro-guanosine-3'-phosphate
  modified_base 17: mod_base = OTHER; note = 2'-O-methyl-guanosine-3'-phosphate
  modified_base 18: mod_base = OTHER; note = 2'-O-methyl-adenosine-3'-phosphate
  modified_base 19: mod_base = OTHER; note = 2'-O-methyl-uridine-3'-phosphorothioate
  modified_base 20: mod_base = OTHER; note = 2'-O-methyl-uridine-3'-phosphorothioate
  modified_base 21: mod_base = OTHER; note = 2'-O-methyl-uridine-3'-phosphate
ttccttgcctgcattggattt

SEQ ID NO: 2415 - RNA, 21 nt, synthetic construct
  source 1..21: mol_type = other RNA
  modified_base 1: mod_base = OTHER; note = 2'-O-methyl-uridine-3'-phosphorothioate
  modified_base 2: mod_base = OTHER; note = 2'-deoxy-2'-fluoro-uridine-3'-phosphorothioate
  modified_base 3: mod_base = OTHER; note = 2'-O-methyl-uridine-3'-phosphate
  modified_base 4: mod_base = OTHER; note = 2'-O-methyl-cytidine-3'-phosphate
  modified_base 5: mod_base = OTHER; note = 2'-O-methyl-cytidine-3'-phosphate
  modified_base 6: mod_base = OTHER; note = 2'-deoxy-2'-fluoro-uridine-3'-phosphate
  modified_base 7: mod_base = OTHER; note = 2'-O-methyl-uridine-3'-phosphate
  modified_base 8: mod_base = OTHER; note = 2'-deoxy-2'-fluoro-guanosine-3'-phosphate
  modified_base 9: mod_base = OTHER; note = 2'-deoxy-2'-fluoro-cytidine-3'-phosphate
  modified_base 10: mod_base = OTHER; note = 2'-O-methyl-cytidine-3'-phosphate
  modified_base 11: mod_base = OTHER; note = 2'-O-methyl-uridine-3'-phosphate
  modified_base 12: mod_base = OTHER; note = 2'-O-methyl-guanosine-3'-phosphate
  modified_base 13: mod_base = OTHER; note = 2'-O-methyl-cytidine-3'-phosphate
  modified_base 14: mod_base = OTHER; note = 2'-deoxy-2'-fluoro-adenosine-3'-phosphate
  modified_base 15: mod_base = OTHER; note = 2'-O-methyl-uridine-3'-phosphate
  modified_base 16: mod_base = OTHER; note = 2'-deoxy-2'-fluoro-uridine-3'-phosphate
  modified_base 17: mod_base = OTHER; note = 2'-O-methyl-guanosine-3'-phosphate
  modified_base 18: mod_base = OTHER; note = 2'-O-methyl-guanosine-3'-phosphate
  modified_base 19: mod_base = OTHER; note = 2'-O-methyl-adenosine-3'-phosphorothioate
  modified_base 20: mod_base = OTHER; note = 2'-O-methyl-uridine-3'-phosphorothioate
  modified_base 21: mod_base = OTHER; note = 2'-O-methyl-uridine-3'-phosphate
tttccttgcctgcattggatt

SEQ ID NO: 2416 - RNA, 21 nt, synthetic construct
  source 1..21: mol_type = other RNA
  modified_base 1: mod_base = OTHER; note = 2'-O-methyl-uridine-3'-phosphorothioate
  modified_base 2: mod_base = OTHER; note = 2'-deoxy-2'-fluoro-uridine-3'-phosphorothioate
  modified_base 3: mod_base = OTHER; note = 2'-O-methyl-uridine-3'-phosphate
  modified_base 4: mod_base = OTHER; note = 2'-O-methyl-uridine-3'-phosphate
  modified_base 5: mod_base = OTHER; note = 2'-O-methyl-cytidine-3'-phosphate
  modified_base 6: mod_base = OTHER; note = 2'-deoxy-2'-fluoro-cytidine-3'-phosphate
  modified_base 7: mod_base = OTHER; note = 2'-O-methyl-uridine-3'-phosphate
  modified_base 8: mod_base = OTHER; note = 2'-deoxy-2'-fluoro-uridine-3'-phosphate
  modified_base 9: mod_base = OTHER; note = 2'-deoxy-2'-fluoro-guanosine-3'-phosphate
  modified_base 10: mod_base = OTHER; note = 2'-O-methyl-cytidine-3'-phosphate
  modified_base 11: mod_base = OTHER; note = 2'-O-methyl-cytidine-3'-phosphate
  modified_base 12: mod_base = OTHER; note = 2'-O-methyl-uridine-3'-phosphate
  modified_base 13: mod_base = OTHER; note = 2'-O-methyl-guanosine-3'-phosphate
  modified_base 14: mod_base = OTHER; note = 2'-deoxy-2'-fluoro-cytidine-3'-phosphate
  modified_base 15: mod_base = OTHER; note = 2'-O-methyl-adenosine-3'-phosphate
  modified_base 16: mod_base = OTHER; note = 2'-deoxy-2'-fluoro-uridine-3'-phosphate
  modified_base 17: mod_base = OTHER; note = 2'-O-methyl-uridine-3'-phosphate
  modified_base 18: mod_base = OTHER; note = 2'-O-methyl-guanosine-3'-phosphate
  modified_base 19: mod_base = OTHER; note = 2'-O-methyl-guanosine-3'-phosphorothioate
  modified_base 20: mod_base = OTHER; note = 2'-O-methyl-uridine-3'-phosphorothioate
  modified_base 21: mod_base = OTHER; note = 2'-O-methyl-uridine-3'-phosphate
ttttccttgcctgcattggtt

SEQ ID NO: 2417 - RNA, 21 nt, synthetic construct
  source 1..21: mol_type = other RNA
  modified_base 1: mod_base = OTHER; note = 2'-O-methyl-uridine-3'-phosphorothioate
  modified_base 2: mod_base = OTHER; note = 2'-deoxy-2'-fluoro-uridine-3'-phosphorothioate
  modified_base 3: mod_base = OTHER; note = 2'-O-methyl-uridine-3'-phosphate
  modified_base 4: mod_base = OTHER; note = 2'-O-methyl-uridine-3'-phosphate
  modified_base 5: mod_base = OTHER; note = 2'-O-methyl-uridine-3'-phosphate
  modified_base 6: mod_base = OTHER; note = 2'-deoxy-2'-fluoro-cytidine-3'-phosphate
  modified_base 7: mod_base = OTHER; note = 2'-O-methyl-cytidine-3'-phosphate
  modified_base 8: mod_base = OTHER; note = 2'-deoxy-2'-fluoro-uridine-3'-phosphate
  modified_base 9: mod_base = OTHER; note = 2'-deoxy-2'-fluoro-uridine-3'-phosphate
  modified_base 10: mod_base = OTHER; note = 2'-O-methyl-guanosine-3'-phosphate
  modified_base 11: mod_base = OTHER; note = 2'-O-methyl-cytidine-3'-phosphate
  modified_base 12: mod_base = OTHER; note = 2'-O-methyl-cytidine-3'-phosphate
  modified_base 13: mod_base = OTHER; note = 2'-O-methyl-uridine-3'-phosphate
  modified_base 14: mod_base = OTHER; note = 2'-deoxy-2'-fluoro-guanosine-3'-phosphate
  modified_base 15: mod_base = OTHER; note = 2'-O-methyl-cytidine-3'-phosphate
  modified_base 16: mod_base = OTHER; note = 2'-deoxy-2'-fluoro-adenosine-3'-phosphate
  modified_base 17: mod_base = OTHER; note = 2'-O-methyl-uridine-3'-phosphate
  modified_base 18: mod_base = OTHER; note = 2'-O-methyl-uridine-3'-phosphate
  modified_base 19: mod_base = OTHER; note = 2'-O-methyl-guanosine-3'-phosphorothioate
  modified_base 20: mod_base = OTHER; note = 2'-O-methyl-uridine-3'-phosphorothioate
  modified_base 21: mod_base = OTHER; note = 2'-O-methyl-uridine-3'-phosphate
tttttccttgcctgcattgtt

SEQ ID NO: 2418 - RNA, 21 nt, synthetic construct
  source 1..21: mol_type = other RNA
  modified_base 1: mod_base = OTHER; note = 2'-O-methyl-uridine-3'-phosphorothioate
  modified_base 2: mod_base = OTHER; note = 2'-deoxy-2'-fluoro-adenosine-3'-phosphorothioate
  modified_base 3: mod_base = OTHER; note = 2'-O-methyl-uridine-3'-phosphate
  modified_base 4: mod_base = OTHER; note = 2'-O-methyl-uridine-3'-phosphate
  modified_base 5: mod_base = OTHER; note = 2'-O-methyl-uridine-3'-phosphate
  modified_base 6: mod_base = OTHER; note = 2'-deoxy-2'-fluoro-uridine-3'-phosphate
  modified_base 7: mod_base = OTHER; note = 2'-O-methyl-cytidine-3'-phosphate
  modified_base 8: mod_base = OTHER; note = 2'-deoxy-2'-fluoro-cytidine-3'-phosphate
  modified_base 9: mod_base = OTHER; note = 2'-deoxy-2'-fluoro-uridine-3'-phosphate
  modified_base 10: mod_base = OTHER; note = 2'-O-methyl-uridine-3'-phosphate
  modified_base 11: mod_base = OTHER; note = 2'-O-methyl-guanosine-3'-phosphate
  modified_base 12: mod_base = OTHER; note = 2'-O-methyl-cytidine-3'-phosphate
  modified_base 13: mod_base = OTHER; note = 2'-O-methyl-cytidine-3'-phosphate
  modified_base 14: mod_base = OTHER; note = 2'-deoxy-2'-fluoro-uridine-3'-phosphate
  modified_base 15: mod_base = OTHER; note = 2'-O-methyl-guanosine-3'-phosphate
  modified_base 16: mod_base = OTHER; note = 2'-deoxy-2'-fluoro-cytidine-3'-phosphate
  modified_base 17: mod_base = OTHER; note = 2'-O-methyl-adenosine-3'-phosphate
  modified_base 18: mod_base = OTHER; note = 2'-O-methyl-uridine-3'-phosphate
  modified_base 19: mod_base = OTHER; note = 2'-O-methyl-uridine-3'-phosphorothioate
  modified_base 20: mod_base = OTHER; note = 2'-O-methyl-uridine-3'-phosphorothioate
  modified_base 21: mod_base = OTHER; note = 2'-O-methyl-uridine-3'-phosphate
tattttccttgcctgcatttt

SEQ ID NO: 2419 - RNA, 21 nt, synthetic construct
  source 1..21: mol_type = other RNA
  modified_base 1: mod_base = OTHER; note = 2'-O-methyl-uridine-3'-phosphorothioate
  modified_base 2: mod_base = OTHER; note = 2'-deoxy-2'-fluoro-adenosine-3'-phosphorothioate
  modified_base 3: mod_base = OTHER; note = 2'-O-methyl-uridine-3'-phosphate
  modified_base 4: mod_base = OTHER; note = 2'-O-methyl-cytidine-3'-phosphate
  modified_base 5: mod_base = OTHER; note = 2'-O-methyl-uridine-3'-phosphate
  modified_base 6: mod_base = OTHER; note = 2'-deoxy-2'-fluoro-uridine-3'-phosphate
  modified_base 7: mod_base = OTHER; note = 2'-O-methyl-uridine-3'-phosphate
  modified_base 8: mod_base = OTHER; note = 2'-deoxy-2'-fluoro-uridine-3'-phosphate
  modified_base 9: mod_base = OTHER; note = 2'-deoxy-2'-fluoro-adenosine-3'-phosphate
  modified_base 10: mod_base = OTHER; note = 2'-O-methyl-uridine-3'-phosphate
  modified_base 11: mod_base = OTHER; note = 2'-O-methyl-uridine-3'-phosphate
  modified_base 12: mod_base = OTHER; note = 2'-O-methyl-uridine-3'-phosphate
  modified_base 13: mod_base = OTHER; note = 2'-O-methyl-uridine-3'-phosphate
  modified_base 14: mod_base = OTHER; note = 2'-deoxy-2'-fluoro-cytidine-3'-phosphate
  modified_base 15: mod_base = OTHER; note = 2'-O-methyl-cytidine-3'-phosphate
  modified_base 16: mod_base = OTHER; note = 2'-deoxy-2'-fluoro-uridine-3'-phosphate
  modified_base 17: mod_base = OTHER; note = 2'-O-methyl-uridine-3'-phosphate
  modified_base 18: mod_base = OTHER; note = 2'-O-methyl-guanosine-3'-phosphate
  modified_base 19: mod_base = OTHER; note = 2'-O-methyl-cytidine-3'-phosphorothioate
  modified_base 20: mod_base = OTHER; note = 2'-O-methyl-uridine-3'-phosphorothioate
  modified_base 21: mod_base = OTHER; note = 2'-O-methyl-uridine-3'-phosphate
tatcttttattttccttgctt

SEQ ID NO: 2420 - RNA, 21 nt, synthetic construct
  source 1..21: mol_type = other RNA
  modified_base 1: mod_base = OTHER; note = 2'-O-methyl-uridine-3'-phosphorothioate
  modified_base 2: mod_base = OTHER; note = 2'-deoxy-2'-fluoro-cytidine-3'-phosphorothioate
  modified_base 3: mod_base = OTHER; note = 2'-O-methyl-adenosine-3'-phosphate
  modified_base 4: mod_base = OTHER; note = 2'-O-methyl-cytidine-3'-phosphate
  modified_base 5: mod_base = OTHER; note = 2'-O-methyl-uridine-3'-phosphate
  modified_base 6: mod_base = OTHER; note = 2'-deoxy-2'-fluoro-guanosine-3'-phosphate
  modified_base 7: mod_base = OTHER; note = 2'-O-methyl-guanosine-3'-phosphate
  modified_base 8: mod_base = OTHER; note = 2'-deoxy-2'-fluoro-adenosine-3'-phosphate
  modified_base 9: mod_base = OTHER; note = 2'-deoxy-2'-fluoro-adenosine-3'-phosphate
  modified_base 10: mod_base = OTHER; note = 2'-O-methyl-adenosine-3'-phosphate
  modified_base 11: mod_base = OTHER; note = 2'-O-methyl-uridine-3'-phosphate
  modified_base 12: mod_base = OTHER; note = 2'-O-methyl-cytidine-3'-phosphate
  modified_base 13: mod_base = OTHER; note = 2'-O-methyl-uridine-3'-phosphate
  modified_base 14: mod_base = OTHER; note = 2'-deoxy-2'-fluoro-uridine-3'-phosphate
  modified_base 15: mod_base = OTHER; note = 2'-O-methyl-uridine-3'-phosphate
  modified_base 16: mod_base = OTHER; note = 2'-deoxy-2'-fluoro-uridine-3'-phosphate
  modified_base 17: mod_base = OTHER; note = 2'-O-methyl-adenosine-3'-phosphate
  modified_base 18: mod_base = OTHER; note = 2'-O-methyl-uridine-3'-phosphate
  modified_base 19: mod_base = OTHER; note = 2'-O-methyl-uridine-3'-phosphorothioate
  modified_base 20: mod_base = OTHER; note = 2'-O-methyl-uridine-3'-phosphorothioate
  modified_base 21: mod_base = OTHER; note = 2'-O-methyl-uridine-3'-phosphate
tcactggaaatcttttatttt

SEQ ID NO: 2421 - RNA, 21 nt, synthetic construct
  source 1..21: mol_type = other RNA
  modified_base 1: mod_base = OTHER; note = 2'-O-methyl-uridine-3'-phosphorothioate
  modified_base 2: mod_base = OTHER; note = 2'-deoxy-2'-fluoro-uridine-3'-phosphorothioate
  modified_base 3: mod_base = OTHER; note = 2'-O-methyl-cytidine-3'-phosphate
  modified_base 4: mod_base = OTHER; note = 2'-O-methyl-adenosine-3'-phosphate
  modified_base 5: mod_base = OTHER; note = 2'-O-methyl-cytidine-3'-phosphate
  modified_base 6: mod_base = OTHER; note = 2'-deoxy-2'-fluoro-uridine-3'-phosphate
  modified_base 7: mod_base = OTHER; note = 2'-O-methyl-guanosine-3'-phosphate
  modified_base 8: mod_base = OTHER; note = 2'-deoxy-2'-fluoro-guanosine-3'-phosphate
  modified_base 9: mod_base = OTHER; note = 2'-deoxy-2'-fluoro-adenosine-3'-phosphate
  modified_base 10: mod_base = OTHER; note = 2'-O-methyl-adenosine-3'-phosphate
  modified_base 11: mod_base = OTHER; note = 2'-O-methyl-adenosine-3'-phosphate
  modified_base 12: mod_base = OTHER; note = 2'-O-methyl-uridine-3'-phosphate
  modified_base 13: mod_base = OTHER; note = 2'-O-methyl-cytidine-3'-phosphate
  modified_base 14: mod_base = OTHER; note = 2'-deoxy-2'-fluoro-uridine-3'-phosphate
  modified_base 15: mod_base = OTHER; note = 2'-O-methyl-uridine-3'-phosphate
  modified_base 16: mod_base = OTHER; note = 2'-deoxy-2'-fluoro-uridine-3'-phosphate
  modified_base 17: mod_base = OTHER; note = 2'-O-methyl-uridine-3'-phosphate
  modified_base 18: mod_base = OTHER; note = 2'-O-methyl-adenosine-3'-phosphate
  modified_base 19: mod_base = OTHER; note = 2'-O-methyl-uridine-3'-phosphorothioate
  modified_base 20: mod_base = OTHER; note = 2'-O-methyl-uridine-3'-phosphorothioate
  modified_base 21: mod_base = OTHER; note = 2'-O-methyl-uridine-3'-phosphate
ttcactggaaatcttttattt

SEQ ID NO: 2422 - RNA, 21 nt, synthetic construct
  source 1..21: mol_type = other RNA
  modified_base 1: mod_base = OTHER; note = 2'-O-methyl-uridine-3'-phosphorothioate
  modified_base 2: mod_base = OTHER; note = 2'-deoxy-2'-fluoro-guanosine-3'-phosphorothioate
  modified_base 3: mod_base = OTHER; note = 2'-O-methyl-uridine-3'-phosphate
  modified_base 4: mod_base = OTHER; note = 2'-O-methyl-cytidine-3'-phosphate
  modified_base 5: mod_base = OTHER; note = 2'-O-methyl-adenosine-3'-phosphate
  modified_base 6: mod_base = OTHER; note = 2'-deoxy-2'-fluoro-cytidine-3'-phosphate
  modified_base 7: mod_base = OTHER; note = 2'-O-methyl-uridine-3'-phosphate
  modified_base 8: mod_base = OTHER; note = 2'-deoxy-2'-fluoro-guanosine-3'-phosphate
  modified_base 9: mod_base = OTHER; note = 2'-deoxy-2'-fluoro-guanosine-3'-phosphate
  modified_base 10: mod_base = OTHER; note = 2'-O-methyl-adenosine-3'-phosphate
  modified_base 11: mod_base = OTHER; note = 2'-O-methyl-adenosine-3'-phosphate
  modified_base 12: mod_base = OTHER; note = 2'-O-methyl-adenosine-3'-phosphate
  modified_base 13: mod_base = OTHER; note = 2'-O-methyl-uridine-3'-phosphate
  modified_base 14: mod_base = OTHER; note = 2'-deoxy-2'-fluoro-cytidine-3'-phosphate
  modified_base 15: mod_base = OTHER; note = 2'-O-methyl-uridine-3'-phosphate
  modified_base 16: mod_base = OTHER; note = 2'-deoxy-2'-fluoro-uridine-3'-phosphate
  modified_base 17: mod_base = OTHER; note = 2'-O-methyl-uridine-3'-phosphate
  modified_base 18: mod_base = OTHER; note = 2'-O-methyl-uridine-3'-phosphate
  modified_base 19: mod_base = OTHER; note = 2'-O-methyl-adenosine-3'-phosphorothioate
  modified_base 20: mod_base = OTHER; note = 2'-O-methyl-uridine-3'-phosphorothioate
  modified_base 21: mod_base = OTHER; note = 2'-O-methyl-uridine-3'-phosphate
tgtcactggaaatcttttatt

SEQ ID NO: 2423 - RNA, 21 nt, synthetic construct
  source 1..21: mol_type = other RNA
  modified_base 1: mod_base = OTHER; note = 2'-O-methyl-uridine-3'-phosphorothioate
  modified_base 2: mod_base = OTHER; note = 2'-deoxy-2'-fluoro-uridine-3'-phosphorothioate
  modified_base 3: mod_base = OTHER; note = 2'-O-methyl-guanosine-3'-phosphate
  modified_base 4: mod_base = OTHER; note = 2'-O-methyl-uridine-3'-phosphate
  modified_base 5: mod_base = OTHER; note = 2'-O-methyl-cytidine-3'-phosphate
  modified_base 6: mod_base = OTHER; note = 2'-deoxy-2'-fluoro-adenosine-3'-phosphate
  modified_base 7: mod_base = OTHER; note = 2'-O-methyl-cytidine-3'-phosphate
  modified_base 8: mod_base = OTHER; note = 2'-deoxy-2'-fluoro-uridine-3'-phosphate
  modified_base 9: mod_base = OTHER; note = 2'-deoxy-2'-fluoro-guanosine-3'-phosphate
  modified_base 10: mod_base = OTHER; note = 2'-O-methyl-guanosine-3'-phosphate
  modified_base 11: mod_base = OTHER; note = 2'-O-methyl-adenosine-3'-phosphate
  modified_base 12: mod_base = OTHER; note = 2'-O-methyl-adenosine-3'-phosphate
  modified_base 13: mod_base = OTHER; note = 2'-O-methyl-adenosine-3'-phosphate
  modified_base 14: mod_base = OTHER; note = 2'-deoxy-2'-fluoro-uridine-3'-phosphate
  modified_base 15: mod_base = OTHER; note = 2'-O-methyl-cytidine-3'-phosphate
  modified_base 16: mod_base = OTHER; note = 2'-deoxy-2'-fluoro-uridine-3'-phosphate
  modified_base 17: mod_base = OTHER; note = 2'-O-methyl-uridine-3'-phosphate
  modified_base 18: mod_base = OTHER; note = 2'-O-methyl-uridine-3'-phosphate
  modified_base 19: mod_base = OTHER; note = 2'-O-methyl-uridine-3'-phosphorothioate
  modified_base 20: mod_base = OTHER; note = 2'-O-methyl-uridine-3'-phosphorothioate
  modified_base 21: mod_base = OTHER; note = 2'-O-methyl-uridine-3'-phosphate
ttgtcactggaaatctttttt

SEQ ID NO: 2424 - RNA, 21 nt, synthetic construct
  source 1..21: mol_type = other RNA
  modified_base 1: mod_base = OTHER; note = 2'-O-methyl-uridine-3'-phosphorothioate
  modified_base 2: mod_base = OTHER; note = 2'-deoxy-2'-fluoro-guanosine-3'-phosphorothioate
  modified_base 3: mod_base = OTHER; note = 2'-O-methyl-guanosine-3'-phosphate
  modified_base 4: mod_base = OTHER; note = 2'-O-methyl-adenosine-3'-phosphate
  modified_base 5: mod_base = OTHER; note = 2'-O-methyl-guanosine-3'-phosphate
  modified_base 6: mod_base = OTHER; note = 2'-deoxy-2'-fluoro-adenosine-3'-phosphate
  modified_base 7: mod_base = OTHER; note = 2'-O-methyl-guanosine-3'-phosphate
  modified_base 8: mod_base = OTHER; note = 2'-deoxy-2'-fluoro-adenosine-3'-phosphate
  modified_base 9: mod_base = OTHER; note = 2'-deoxy-2'-fluoro-guanosine-3'-phosphate
  modified_base 10: mod_base = OTHER; note = 2'-O-methyl-adenosine-3'-phosphate
  modified_base 11: mod_base = OTHER; note = 2'-O-methyl-adenosine-3'-phosphate
  modified_base 12: mod_base = OTHER; note = 2'-O-methyl-uridine-3'-phosphate
  modified_base 13: mod_base = OTHER; note = 2'-O-methyl-uridine-3'-phosphate
  modified_base 14: mod_base = OTHER; note = 2'-deoxy-2'-fluoro-cytidine-3'-phosphate
  modified_base 15: mod_base = OTHER; note = 2'-O-methyl-adenosine-3'-phosphate
  modified_base 16: mod_base = OTHER; note = 2'-deoxy-2'-fluoro-uridine-3'-phosphate
  modified_base 17: mod_base = OTHER; note = 2'-O-methyl-adenosine-3'-phosphate
  modified_base 18: mod_base = OTHER; note = 2'-O-methyl-uridine-3'-phosphate
  modified_base 19: mod_base = OTHER; note = 2'-O-methyl-adenosine-3'-phosphorothioate
  modified_base 20: mod_base = OTHER; note = 2'-O-methyl-uridine-3'-phosphorothioate
  modified_base 21: mod_base = OTHER; note = 2'-O-methyl-uridine-3'-phosphate
tggagagagaattcatatatt

SEQ ID NO: 2425 - RNA, 21 nt, synthetic construct
  source 1..21: mol_type = other RNA
  modified_base 1: mod_base = OTHER; note = 2'-O-methyl-uridine-3'-phosphorothioate
  modified_base 2: mod_base = OTHER; note = 2'-deoxy-2'-fluoro-uridine-3'-phosphorothioate
  modified_base 3: mod_base = OTHER; note = 2'-O-methyl-guanosine-3'-phosphate
  modified_base 4: mod_base = OTHER; note = 2'-O-methyl-guanosine-3'-phosphate
  modified_base 5: mod_base = OTHER; note = 2'-O-methyl-adenosine-3'-phosphate
  modified_base 6: mod_base = OTHER; note = 2'-deoxy-2'-fluoro-guanosine-3'-phosphate
  modified_base 7: mod_base = OTHER; note = 2'-O-methyl-adenosine-3'-phosphate
  modified_base 8: mod_base = OTHER; note = 2'-deoxy-2'-fluoro-guanosine-3'-phosphate
  modified_base 9: mod_base = OTHER; note = 2'-deoxy-2'-fluoro-adenosine-3'-phosphate
  modified_base 10: mod_base = OTHER; note = 2'-O-methyl-guanosine-3'-phosphate
  modified_base 11: mod_base = OTHER; note = 2'-O-methyl-adenosine-3'-phosphate
  modified_base 12: mod_base = OTHER; note = 2'-O-methyl-adenosine-3'-phosphate
  modified_base 13: mod_base = OTHER; note = 2'-O-methyl-uridine-3'-phosphate
  modified_base 14: mod_base = OTHER; note = 2'-deoxy-2'-fluoro-uridine-3'-phosphate
  modified_base 15: mod_base = OTHER; note = 2'-O-methyl-cytidine-3'-phosphate
  modified_base 16: mod_base = OTHER; note = 2'-deoxy-2'-fluoro-adenosine-3'-phosphate
  modified_base 17: mod_base = OTHER; note = 2'-O-methyl-uridine-3'-phosphate
  modified_base 18: mod_base = OTHER; note = 2'-O-methyl-adenosine-3'-phosphate
  modified_base 19: mod_base = OTHER; note = 2'-O-methyl-uridine-3'-phosphorothioate
  modified_base 20: mod_base = OTHER; note = 2'-O-methyl-uridine-3'-phosphorothioate
  modified_base 21: mod_base = OTHER; note = 2'-O-methyl-uridine-3'-phosphate
ttggagagagaattcatattt

SEQ ID NO: 2426 - RNA, 21 nt, synthetic construct
  source 1..21: mol_type = other RNA
  modified_base 1: mod_base = OTHER; note = 2'-O-methyl-uridine-3'-phosphorothioate
  modified_base 2: mod_base = OTHER; note = 2'-deoxy-2'-fluoro-uridine-3'-phosphorothioate
  modified_base 3: mod_base = OTHER; note = 2'-O-methyl-uridine-3'-phosphate
  modified_base 4: mod_base = OTHER; note = 2'-O-methyl-guanosine-3'-phosphate
  modified_base 5: mod_base = OTHER; note = 2'-O-methyl-guanosine-3'-phosphate
  modified_base 6: mod_base = OTHER; note = 2'-deoxy-2'-fluoro-adenosine-3'-phosphate
  modified_base 7: mod_base = OTHER; note = 2'-O-methyl-guanosine-3'-phosphate
  modified_base 8: mod_base = OTHER; note = 2'-deoxy-2'-fluoro-adenosine-3'-phosphate
  modified_base 9: mod_base = OTHER; note = 2'-deoxy-2'-fluoro-guanosine-3'-phosphate
  modified_base 10: mod_base = OTHER; note = 2'-O-methyl-adenosine-3'-phosphate
  modified_base 11: mod_base = OTHER; note = 2'-O-methyl-guanosine-3'-phosphate
  modified_base 12: mod_base = OTHER; note = 2'-O-methyl-adenosine-3'-phosphate
  modified_base 13: mod_base = OTHER; note = 2'-O-methyl-adenosine-3'-phosphate
  modified_base 14: mod_base = OTHER; note = 2'-deoxy-2'-fluoro-uridine-3'-phosphate
  modified_base 15: mod_base = OTHER; note = 2'-O-methyl-uridine-3'-phosphate
  modified_base 16: mod_base = OTHER; note = 2'-deoxy-2'-fluoro-cytidine-3'-phosphate
  modified_base 17: mod_base = OTHER; note = 2'-O-methyl-adenosine-3'-phosphate
  modified_base 18: mod_base = OTHER; note = 2'-O-methyl-uridine-3'-phosphate
  modified_base 19: mod_base = OTHER; note = 2'-O-methyl-adenosine-3'-phosphorothioate
  modified_base 20: mod_base = OTHER; note = 2'-O-methyl-uridine-3'-phosphorothioate
  modified_base 21: mod_base = OTHER; note = 2'-O-methyl-uridine-3'-phosphate
tttggagagagaattcatatt

SEQ ID NO: 2427 - RNA, 21 nt, synthetic construct
  source 1..21: mol_type = other RNA
  modified_base 1: mod_base = OTHER; note = 2'-O-methyl-uridine-3'-phosphorothioate
  modified_base 2: mod_base = OTHER; note = 2'-deoxy-2'-fluoro-uridine-3'-phosphorothioate
  modified_base 3: mod_base = OTHER; note = 2'-O-methyl-uridine-3'-phosphate
  modified_base 4: mod_base = OTHER; note = 2'-O-methyl-uridine-3'-phosphate
  modified_base 5: mod_base = OTHER; note = 2'-O-methyl-guanosine-3'-phosphate
  modified_base 6: mod_base = OTHER; note = 2'-deoxy-2'-fluoro-guanosine-3'-phosphate
  modified_base 7: mod_base = OTHER; note = 2'-O-methyl-adenosine-3'-phosphate
  modified_base 8: mod_base = OTHER; note = 2'-deoxy-2'-fluoro-guanosine-3'-phosphate
  modified_base 9: mod_base = OTHER; note = 2'-deoxy-2'-fluoro-adenosine-3'-phosphate
  modified_base 10: mod_base = OTHER; note = 2'-O-methyl-guanosine-3'-phosphate
  modified_base 11: mod_base = OTHER; note = 2'-O-methyl-adenosine-3'-phosphate
  modified_base 12: mod_base = OTHER; note = 2'-O-methyl-guanosine-3'-phosphate
  modified_base 13: mod_base = OTHER; note = 2'-O-methyl-adenosine-3'-phosphate
  modified_base 14: mod_base = OTHER; note = 2'-deoxy-2'-fluoro-adenosine-3'-phosphate
  modified_base 15: mod_base = OTHER; note = 2'-O-methyl-uridine-3'-phosphate
  modified_base 16: mod_base = OTHER; note = 2'-deoxy-2'-fluoro-uridine-3'-phosphate
  modified_base 17: mod_base = OTHER; note = 2'-O-methyl-cytidine-3'-phosphate
  modified_base 18: mod_base = OTHER; note = 2'-O-methyl-adenosine-3'-phosphate
  modified_base 19: mod_base = OTHER; note = 2'-O-methyl-uridine-3'-phosphorothioate
  modified_base 20: mod_base = OTHER; note = 2'-O-methyl-uridine-3'-phosphorothioate
  modified_base 21: mod_base = OTHER; note = 2'-O-methyl-uridine-3'-phosphate
ttttggagagagaattcattt

SEQ ID NO: 2428 - RNA, 21 nt, synthetic construct
  source 1..21: mol_type = other RNA
  modified_base 1: mod_base = OTHER; note = 2'-O-methyl-uridine-3'-phosphorothioate
  modified_base 2: mod_base = OTHER; note = 2'-deoxy-2'-fluoro-adenosine-3'-phosphorothioate
  modified_base 3: mod_base = OTHER; note = 2'-O-methyl-uridine-3'-phosphate
  modified_base 4: mod_base = OTHER; note = 2'-O-methyl-uridine-3'-phosphate
  modified_base 5: mod_base = OTHER; note = 2'-O-methyl-uridine-3'-phosphate
  modified_base 6: mod_base = OTHER; note = 2'-deoxy-2'-fluoro-guanosine-3'-phosphate
  modified_base 7: mod_base = OTHER; note = 2'-O-methyl-guanosine-3'-phosphate
  modified_base 8: mod_base = OTHER; note = 2'-deoxy-2'-fluoro-adenosine-3'-phosphate
  modified_base 9: mod_base = OTHER; note = 2'-deoxy-2'-fluoro-guanosine-3'-phosphate
  modified_base 10: mod_base = OTHER; note = 2'-O-methyl-adenosine-3'-phosphate
  modified_base 11: mod_base = OTHER; note = 2'-O-methyl-guanosine-3'-phosphate
  modified_base 12: mod_base = OTHER; note = 2'-O-methyl-adenosine-3'-phosphate
  modified_base 13: mod_base = OTHER; note = 2'-O-methyl-guanosine-3'-phosphate
  modified_base 14: mod_base = OTHER; note = 2'-deoxy-2'-fluoro-adenosine-3'-phosphate
  modified_base 15: mod_base = OTHER; note = 2'-O-methyl-adenosine-3'-phosphate
  modified_base 16: mod_base = OTHER; note = 2'-deoxy-2'-fluoro-uridine-3'-phosphate
  modified_base 17: mod_base = OTHER; note = 2'-O-methyl-uridine-3'-phosphate
  modified_base 18: mod_base = OTHER; note = 2'-O-methyl-cytidine-3'-phosphate
  modified_base 19: mod_base = OTHER; note = 2'-O-methyl-adenosine-3'-phosphorothioate
  modified_base 20: mod_base = OTHER; note = 2'-O-methyl-uridine-3'-phosphorothioate
  modified_base 21: mod_base = OTHER; note = 2'-O-methyl-uridine-3'-phosphate
tatttggagagagaattcatt

SEQ ID NO: 2429 - RNA, 21 nt, synthetic construct
  source 1..21: mol_type = other RNA
  modified_base 1: mod_base = OTHER; note = 2'-O-methyl-uridine-3'-phosphorothioate
  modified_base 2: mod_base = OTHER; note = 2'-deoxy-2'-fluoro-uridine-3'-phosphorothioate
  modified_base 3: mod_base = OTHER; note = 2'-O-methyl-adenosine-3'-phosphate
  modified_base 4: mod_base = OTHER; note = 2'-O-methyl-uridine-3'-phosphate
  modified_base 5: mod_base = OTHER; note = 2'-O-methyl-uridine-3'-phosphate
  modified_base 6: mod_base = OTHER; note = 2'-deoxy-2'-fluoro-uridine-3'-phosphate
  modified_base 7: mod_base = OTHER; note = 2'-O-methyl-guanosine-3'-phosphate
  modified_base 8: mod_base = OTHER; note = 2'-deoxy-2'-fluoro-guanosine-3'-phosphate
  modified_base 9: mod_base = OTHER; note = 2'-deoxy-2'-fluoro-adenosine-3'-phosphate
  modified_base 10: mod_base = OTHER; note = 2'-O-methyl-guanosine-3'-phosphate
  modified_base 11: mod_base = OTHER; note = 2'-O-methyl-adenosine-3'-phosphate
  modified_base 12: mod_base = OTHER; note = 2'-O-methyl-guanosine-3'-phosphate
  modified_base 13: mod_base = OTHER; note = 2'-O-methyl-adenosine-3'-phosphate
  modified_base 14: mod_base = OTHER; note = 2'-deoxy-2'-fluoro-guanosine-3'-phosphate
  modified_base 15: mod_base = OTHER; note = 2'-O-methyl-adenosine-3'-phosphate
  modified_base 16: mod_base = OTHER; note = 2'-deoxy-2'-fluoro-adenosine-3'-phosphate
  modified_base 17: mod_base = OTHER; note = 2'-O-methyl-uridine-3'-phosphate
  modified_base 18: mod_base = OTHER; note = 2'-O-methyl-uridine-3'-phosphate
  modified_base 19: mod_base = OTHER; note = 2'-O-methyl-cytidine-3'-phosphorothioate
  modified_base 20: mod_base = OTHER; note = 2'-O-methyl-uridine-3'-phosphorothioate
  modified_base 21: mod_base = OTHER; note = 2'-O-methyl-uridine-3'-phosphate
ttatttggagagagaattctt

SEQ ID NO: 2430 - RNA, 21 nt, synthetic construct
  source 1..21: mol_type = other RNA
  modified_base 1: mod_base = OTHER; note = 2'-O-methyl-uridine-3'-phosphorothioate
  modified_base 2: mod_base = OTHER; note = 2'-deoxy-2'-fluoro-adenosine-3'-phosphorothioate
  modified_base 3: mod_base = OTHER; note = 2'-O-methyl-uridine-3'-phosphate
  modified_base 4: mod_base = OTHER; note = 2'-O-methyl-adenosine-3'-phosphate
  modified_base 5: mod_base = OTHER; note = 2'-O-methyl-uridine-3'-phosphate
  modified_base 6: mod_base = OTHER; note = 2'-deoxy-2'-fluoro-uridine-3'-phosphate
  modified_base 7: mod_base = OTHER; note = 2'-O-methyl-uridine-3'-phosphate
  modified_base 8: mod_base = OTHER; note = 2'-deoxy-2'-fluoro-guanosine-3'-phosphate
  modified_base 9: mod_base = OTHER; note = 2'-deoxy-2'-fluoro-guanosine-3'-phosphate
  modified_base 10: mod_base = OTHER; note = 2'-O-methyl-adenosine-3'-phosphate
  modified_base 11: mod_base = OTHER; note = 2'-O-methyl-guanosine-3'-phosphate
  modified_base 12: mod_base = OTHER; note = 2'-O-methyl-adenosine-3'-phosphate
  modified_base 13: mod_base = OTHER; note = 2'-O-methyl-guanosine-3'-phosphate
  modified_base 14: mod_base = OTHER; note = 2'-deoxy-2'-fluoro-adenosine-3'-phosphate
  modified_base 15: mod_base = OTHER; note = 2'-O-methyl-guanosine-3'-phosphate
  modified_base 16: mod_base = OTHER; note = 2'-deoxy-2'-fluoro-adenosine-3'-phosphate
  modified_base 17: mod_base = OTHER; note = 2'-O-methyl-adenosine-3'-phosphate
  modified_base 18: mod_base = OTHER; note = 2'-O-methyl-uridine-3'-phosphate
  modified_base 19: mod_base = OTHER; note = 2'-O-methyl-uridine-3'-phosphorothioate
  modified_base 20: mod_base = OTHER; note = 2'-O-methyl-uridine-3'-phosphorothioate
  modified_base 21: mod_base = OTHER; note = 2'-O-methyl-uridine-3'-phosphate
tatatttggagagagaatttt

SEQ ID NO: 2431 - RNA, 21 nt, synthetic construct
  source 1..21: mol_type = other RNA
  modified_base 1: mod_base = OTHER; note = 2'-O-methyl-uridine-3'-phosphorothioate
  modified_base 2: mod_base = OTHER; note = 2'-deoxy-2'-fluoro-adenosine-3'-phosphorothioate
  modified_base 3: mod_base = OTHER; note = 2'-O-methyl-adenosine-3'-phosphate
  modified_base 4: mod_base = OTHER; note = 2'-O-methyl-uridine-3'-phosphate
  modified_base 5: mod_base = OTHER; note = 2'-O-methyl-adenosine-3'-phosphate
  modified_base 6: mod_base = OTHER; note = 2'-deoxy-2'-fluoro-uridine-3'-phosphate
  modified_base 7: mod_base = OTHER; note = 2'-O-methyl-uridine-3'-phosphate
  modified_base 8: mod_base = OTHER; note = 2'-deoxy-2'-fluoro-uridine-3'-phosphate
  modified_base 9: mod_base = OTHER; note = 2'-deoxy-2'-fluoro-guanosine-3'-phosphate
  modified_base 10: mod_base = OTHER; note = 2'-O-methyl-guanosine-3'-phosphate
  modified_base 11: mod_base = OTHER; note = 2'-O-methyl-adenosine-3'-phosphate
  modified_base 12: mod_base = OTHER; note = 2'-O-methyl-guanosine-3'-phosphate
  modified_base 13: mod_base = OTHER; note = 2'-O-methyl-adenosine-3'-phosphate
  modified_base 14: mod_base = OTHER; note = 2'-deoxy-2'-fluoro-guanosine-3'-phosphate
  modified_base 15: mod_base = OTHER; note = 2'-O-methyl-adenosine-3'-phosphate
  modified_base 16: mod_base = OTHER; note = 2'-deoxy-2'-fluoro-guanosine-3'-phosphate
  modified_base 17: mod_base = OTHER; note = 2'-O-methyl-adenosine-3'-phosphate
  modified_base 18: mod_base = OTHER; note = 2'-O-methyl-adenosine-3'-phosphate
  modified_base 19: mod_base = OTHER; note = 2'-O-methyl-uridine-3'-phosphorothioate
  modified_base 20: mod_base = OTHER; note = 2'-O-methyl-uridine-3'-phosphorothioate
  modified_base 21: mod_base = OTHER; note = 2'-O-methyl-uridine-3'-phosphate
taatatttggagagagaattt

SEQ ID NO: 2432 - RNA, 21 nt, synthetic construct
  source 1..21: mol_type = other RNA
  modified_base 1: mod_base = OTHER; note = 2'-O-methyl-uridine-3'-phosphorothioate
  modified_base 2: mod_base = OTHER; note = 2'-deoxy-2'-fluoro-cytidine-3'-phosphorothioate
  modified_base 3: mod_base = OTHER; note = 2'-O-methyl-cytidine-3'-phosphate
  modified_base 4: mod_base = OTHER; note = 2'-O-methyl-adenosine-3'-phosphate
  modified_base 5: mod_base = OTHER; note = 2'-O-methyl-adenosine-3'-phosphate
  modified_base 6: mod_base = OTHER; note = 2'-deoxy-2'-fluoro-cytidine-3'-phosphate
  modified_base 7: mod_base = OTHER; note = 2'-O-methyl-adenosine-3'-phosphate
  modified_base 8: mod_base = OTHER; note = 2'-deoxy-2'-fluoro-adenosine-3'-phosphate
  modified_base 9: mod_base = OTHER; note = 2'-deoxy-2'-fluoro-guanosine-3'-phosphate
  modified_base 10: mod_base = OTHER; note = 2'-O-methyl-uridine-3'-phosphate
  modified_base 11: mod_base = OTHER; note = 2'-O-methyl-uridine-3'-phosphate
  modified_base 12: mod_base = OTHER; note = 2'-O-methyl-cytidine-3'-phosphate
  modified_base 13: mod_base = OTHER; note = 2'-O-methyl-adenosine-3'-phosphate
  modified_base 14: mod_base = OTHER; note = 2'-deoxy-2'-fluoro-uridine-3'-phosphate
  modified_base 15: mod_base = OTHER; note = 2'-O-methyl-uridine-3'-phosphate
  modified_base 16: mod_base = OTHER; note = 2'-deoxy-2'-fluoro-uridine-3'-phosphate
  modified_base 17: mod_base = OTHER; note = 2'-O-methyl-cytidine-3'-phosphate
  modified_base 18: mod_base = OTHER; note = 2'-O-methyl-adenosine-3'-phosphate
  modified_base 19: mod_base = OTHER; note = 2'-O-methyl-adenosine-3'-phosphorothioate
  modified_base 20: mod_base = OTHER; note = 2'-O-methyl-uridine-3'-phosphorothioate
  modified_base 21: mod_base = OTHER; note = 2'-O-methyl-uridine-3'-phosphate
tccaacaagttcatttcaatt

SEQ ID NO: 2433 - RNA, 21 nt, synthetic construct
  source 1..21: mol_type = other RNA
  modified_base 1: mod_base = OTHER; note = 2'-O-methyl-uridine-3'-phosphorothioate
  modified_base 2: mod_base = OTHER; note = 2'-deoxy-2'-fluoro-guanosine-3'-phosphorothioate
  modified_base 3: mod_base = OTHER; note = 2'-O-methyl-guanosine-3'-phosphate
  modified_base 4: mod_base = OTHER; note = 2'-O-methyl-cytidine-3'-phosphate
  modified_base 5: mod_base = OTHER; note = 2'-O-methyl-cytidine-3'-phosphate
  modified_base 6: mod_base = OTHER; note = 2'-deoxy-2'-fluoro-adenosine-3'-phosphate
  modified_base 7: mod_base = OTHER; note = 2'-O-methyl-adenosine-3'-phosphate
  modified_base 8: mod_base = OTHER; note = 2'-deoxy-2'-fluoro-cytidine-3'-phosphate
  modified_base 9: mod_base = OTHER; note = 2'-deoxy-2'-fluoro-adenosine-3'-phosphate
  modified_base 10: mod_base = OTHER; note = 2'-O-methyl-adenosine-3'-phosphate
  modified_base 11: mod_base = OTHER; note = 2'-O-methyl-guanosine-3'-phosphate
  modified_base 12: mod_base = OTHER; note = 2'-O-methyl-uridine-3'-phosphate
  modified_base 13: mod_base = OTHER; note = 2'-O-methyl-uridine-3'-phosphate
  modified_base 14: mod_base = OTHER; note = 2'-deoxy-2'-fluoro-cytidine-3'-phosphate
  modified_base 15: mod_base = OTHER; note = 2'-O-methyl-adenosine-3'-phosphate
  modified_base 16: mod_base = OTHER; note = 2'-deoxy-2'-fluoro-uridine-3'-phosphate
  modified_base 17: mod_base = OTHER; note = 2'-O-methyl-uridine-3'-phosphate
  modified_base 18: mod_base = OTHER; note = 2'-O-methyl-uridine-3'-phosphate
  modified_base 19: mod_base = OTHER; note = 2'-O-methyl-cytidine-3'-phosphorothioate
  modified_base 20: mod_base = OTHER; note = 2'-O-methyl-uridine-3'-phosphorothioate
  modified_base 21: mod_base = OTHER; note = 2'-O-methyl-uridine-3'-phosphate
tggccaacaagttcatttctt

SEQ ID NO: 2434 - RNA, 21 nt, synthetic construct
  source 1..21: mol_type = other RNA
  modified_base 1: mod_base = OTHER; note = 2'-O-methyl-uridine-3'-phosphorothioate
  modified_base 2: mod_base = OTHER; note = 2'-deoxy-2'-fluoro-guanosine-3'-phosphorothioate
  modified_base 3: mod_base = OTHER; note = 2'-O-methyl-guanosine-3'-phosphate
  modified_base 4: mod_base = OTHER; note = 2'-O-methyl-guanosine-3'-phosphate
  modified_base 5: mod_base = OTHER; note = 2'-O-methyl-cytidine-3'-phosphate
  modified_base 6: mod_base = OTHER; note = 2'-deoxy-2'-fluoro-cytidine-3'-phosphate
  modified_base 7: mod_base = OTHER; note = 2'-O-methyl-adenosine-3'-phosphate
  modified_base 8: mod_base = OTHER; note = 2'-deoxy-2'-fluoro-adenosine-3'-phosphate
  modified_base 9: mod_base = OTHER; note = 2'-deoxy-2'-fluoro-cytidine-3'-phosphate
  modified_base 10: mod_base = OTHER; note = 2'-O-methyl-adenosine-3'-phosphate
  modified_base 11: mod_base = OTHER; note = 2'-O-methyl-adenosine-3'-phosphate
  modified_base 12: mod_base = OTHER; note = 2'-O-methyl-guanosine-3'-phosphate
  modified_base 13: mod_base = OTHER; note = 2'-O-methyl-uridine-3'-phosphate
  modified_base 14: mod_base = OTHER; note = 2'-deoxy-2'-fluoro-uridine-3'-phosphate
  modified_base 15: mod_base = OTHER; note = 2'-O-methyl-cytidine-3'-phosphate
  modified_base 16: mod_base = OTHER; note = 2'-deoxy-2'-fluoro-adenosine-3'-phosphate
  modified_base 17: mod_base = OTHER; note = 2'-O-methyl-uridine-3'-phosphate
  modified_base 18: mod_base = OTHER; note = 2'-O-methyl-uridine-3'-phosphate
  modified_base 19: mod_base = OTHER; note = 2'-O-methyl-uridine-3'-phosphorothioate
  modified_base 20: mod_base = OTHER; note = 2'-O-methyl-uridine-3'-phosphorothioate
  modified_base 21: mod_base = OTHER; note = 2'-O-methyl-uridine-3'-phosphate
tgggccaacaagttcattttt

SEQ ID NO: 2435 - RNA, 21 nt, synthetic construct
  source 1..21: mol_type = other RNA
  modified_base 1: mod_base = OTHER; note = 2'-O-methyl-uridine-3'-phosphorothioate
  modified_base 2: mod_base = OTHER; note = 2'-deoxy-2'-fluoro-uridine-3'-phosphorothioate
  modified_base 3: mod_base = OTHER; note = 2'-O-methyl-guanosine-3'-phosphate
  modified_base 4: mod_base = OTHER; note = 2'-O-methyl-guanosine-3'-phosphate
  modified_base 5: mod_base = OTHER; note = 2'-O-methyl-guanosine-3'-phosphate
  modified_base 6: mod_base = OTHER; note = 2'-deoxy-2'-fluoro-cytidine-3'-phosphate
  modified_base 7: mod_base = OTHER; note = 2'-O-methyl-cytidine-3'-phosphate
  modified_base 8: mod_base = OTHER; note = 2'-deoxy-2'-fluoro-adenosine-3'-phosphate
  modified_base 9: mod_base = OTHER; note = 2'-deoxy-2'-fluoro-adenosine-3'-phosphate
  modified_base 10: mod_base = OTHER; note = 2'-O-methyl-cytidine-3'-phosphate
  modified_base 11: mod_base = OTHER; note = 2'-O-methyl-adenosine-3'-phosphate
  modified_base 12: mod_base = OTHER; note = 2'-O-methyl-adenosine-3'-phosphate
  modified_base 13: mod_base = OTHER; note = 2'-O-methyl-guanosine-3'-phosphate
  modified_base 14: mod_base = OTHER; note = 2'-deoxy-2'-fluoro-uridine-3'-phosphate
  modified_base 15: mod_base = OTHER; note = 2'-O-methyl-uridine-3'-phosphate
  modified_base 16: mod_base = OTHER; note = 2'-deoxy-2'-fluoro-cytidine-3'-phosphate
  modified_base 17: mod_base = OTHER; note = 2'-O-methyl-adenosine-3'-phosphate
  modified_base 18: mod_base = OTHER; note = 2'-O-methyl-uridine-3'-phosphate
  modified_base 19: mod_base = OTHER; note = 2'-O-methyl-uridine-3'-phosphorothioate
  modified_base 20: mod_base = OTHER; note = 2'-O-methyl-uridine-3'-phosphorothioate
  modified_base 21: mod_base = OTHER; note = 2'-O-methyl-uridine-3'-phosphate
ttgggccaacaagttcatttt

SEQ ID NO: 2436 - RNA, 21 nt, synthetic construct
  source 1..21: mol_type = other RNA
  modified_base 1: mod_base = OTHER; note = 2'-O-methyl-uridine-3'-phosphorothioate
  modified_base 2: mod_base = OTHER; note = 2'-deoxy-2'-fluoro-adenosine-3'-phosphorothioate
  modified_base 3: mod_base = OTHER; note = 2'-O-methyl-uridine-3'-phosphate
  modified_base 4: mod_base = OTHER; note = 2'-O-methyl-adenosine-3'-phosphate
  modified_base 5: mod_base = OTHER; note = 2'-O-methyl-guanosine-3'-phosphate
  modified_base 6: mod_base = OTHER; note = 2'-deoxy-2'-fluoro-adenosine-3'-phosphate
  modified_base 7: mod_base = OTHER; note = 2'-O-methyl-uridine-3'-phosphate
  modified_base 8: mod_base = OTHER; note = 2'-deoxy-2'-fluoro-guanosine-3'-phosphate
  modified_base 9: mod_base = OTHER; note = 2'-deoxy-2'-fluoro-guanosine-3'-phosphate
  modified_base 10: mod_base = OTHER; note = 2'-O-methyl-guanosine-3'-phosphate
  modified_base 11: mod_base = OTHER; note = 2'-O-methyl-cytidine-3'-phosphate
  modified_base 12: mod_base = OTHER; note = 2'-O-methyl-cytidine-3'-phosphate
  modified_base 13: mod_base = OTHER; note = 2'-O-methyl-adenosine-3'-phosphate
  modified_base 14: mod_base = OTHER; note = 2'-deoxy-2'-fluoro-adenosine-3'-phosphate
  modified_base 15: mod_base = OTHER; note = 2'-O-methyl-cytidine-3'-phosphate
  modified_base 16: mod_base = OTHER; note = 2'-deoxy-2'-fluoro-adenosine-3'-phosphate
  modified_base 17: mod_base = OTHER; note = 2'-O-methyl-adenosine-3'-phosphate
  modified_base 18: mod_base = OTHER; note = 2'-O-methyl-guanosine-3'-phosphate
  modified_base 19: mod_base = OTHER; note = 2'-O-methyl-uridine-3'-phosphorothioate
  modified_base 20: mod_base = OTHER; note = 2'-O-methyl-uridine-3'-phosphorothioate
  modified_base 21: mod_base = OTHER; note = 2'-O-methyl-uridine-3'-phosphate
tatagatgggccaacaagttt

SEQ ID NO: 2437 - RNA, 21 nt, synthetic construct
  source 1..21: mol_type = other RNA
  modified_base 1: mod_base = OTHER; note = 2'-O-methyl-uridine-3'-phosphorothioate
  modified_base 2: mod_base = OTHER; note = 2'-deoxy-2'-fluoro-uridine-3'-phosphorothioate
  modified_base 3: mod_base = OTHER; note = 2'-O-methyl-adenosine-3'-phosphate
  modified_base 4: mod_base = OTHER; note = 2'-O-methyl-adenosine-3'-phosphate
  modified_base 5: mod_base = OTHER; note = 2'-O-methyl-uridine-3'-phosphate
  modified_base 6: mod_base = OTHER; note = 2'-deoxy-2'-fluoro-adenosine-3'-phosphate
  modified_base 7: mod_base = OTHER; note = 2'-O-methyl-guanosine-3'-phosphate
  modified_base 8: mod_base = OTHER; note = 2'-deoxy-2'-fluoro-adenosine-3'-phosphate
  modified_base 9: mod_base = OTHER; note = 2'-deoxy-2'-fluoro-uridine-3'-phosphate
  modified_base 10: mod_base = OTHER; note = 2'-O-methyl-guanosine-3'-phosphate
  modified_base 11: mod_base = OTHER; note = 2'-O-methyl-guanosine-3'-phosphate
  modified_base 12: mod_base = OTHER; note = 2'-O-methyl-guanosine-3'-phosphate
  modified_base 13: mod_base = OTHER; note = 2'-O-methyl-cytidine-3'-phosphate
  modified_base 14: mod_base = OTHER; note = 2'-deoxy-2'-fluoro-cytidine-3'-phosphate
  modified_base 15: mod_base = OTHER; note = 2'-O-methyl-adenosine-3'-phosphate
  modified_base 16: mod_base = OTHER; note = 2'-deoxy-2'-fluoro-adenosine-3'-phosphate
  modified_base 17: mod_base = OTHER; note = 2'-O-methyl-cytidine-3'-phosphate
  modified_base 18: mod_base = OTHER; note = 2'-O-methyl-adenosine-3'-phosphate
  modified_base 19: mod_base = OTHER; note = 2'-O-methyl-adenosine-3'-phosphorothioate
  modified_base 20: mod_base = OTHER; note = 2'-O-methyl-uridine-3'-phosphorothioate
  modified_base 21: mod_base = OTHER; note = 2'-O-methyl-uridine-3'-phosphate
ttaatagatgggccaacaatt

SEQ ID NO: 2438 - RNA, 21 nt, synthetic construct
  source 1..21: mol_type = other RNA
  modified_base 1: mod_base = OTHER; note = 2'-O-methyl-uridine-3'-phosphorothioate
  modified_base 2: mod_base = OTHER; note = 2'-deoxy-2'-fluoro-adenosine-3'-phosphorothioate
  modified_base 3: mod_base = OTHER; note = 2'-O-methyl-uridine-3'-phosphate
  modified_base 4: mod_base = OTHER; note = 2'-O-methyl-guanosine-3'-phosphate
  modified_base 5: mod_base = OTHER; note = 2'-O-methyl-uridine-3'-phosphate
  modified_base 6: mod_base = OTHER; note = 2'-deoxy-2'-fluoro-adenosine-3'-phosphate
  modified_base 7: mod_base = OTHER; note = 2'-O-methyl-adenosine-3'-phosphate
  modified_base 8: mod_base = OTHER; note = 2'-deoxy-2'-fluoro-uridine-3'-phosphate
  modified_base 9: mod_base = OTHER; note = 2'-deoxy-2'-fluoro-adenosine-3'-phosphate
  modified_base 10: mod_base = OTHER; note = 2'-O-methyl-guanosine-3'-phosphate
  modified_base 11: mod_base = OTHER; note = 2'-O-methyl-adenosine-3'-phosphate
  modified_base 12: mod_base = OTHER; note = 2'-O-methyl-uridine-3'-phosphate
  modified_base 13: mod_base = OTHER; note = 2'-O-methyl-guanosine-3'-phosphate
  modified_base 14: mod_base = OTHER; note = 2'-deoxy-2'-fluoro-guanosine-3'-phosphate
  modified_base 15: mod_base = OTHER; note = 2'-O-methyl-guanosine-3'-phosphate
  modified_base 16: mod_base = OTHER; note = 2'-deoxy-2'-fluoro-cytidine-3'-phosphate
  modified_base 17: mod_base = OTHER; note = 2'-O-methyl-cytidine-3'-phosphate
  modified_base 18: mod_base = OTHER; note = 2'-O-methyl-adenosine-3'-phosphate
  modified_base 19: mod_base = OTHER; note = 2'-O-methyl-adenosine-3'-phosphorothioate
  modified_base 20: mod_base = OTHER; note = 2'-O-methyl-uridine-3'-phosphorothioate
  modified_base 21: mod_base = OTHER; note = 2'-O-methyl-uridine-3'-phosphate
tatgtaatagatgggccaatt

SEQ ID NO: 2439 - RNA, 21 nt, synthetic construct
  source 1..21: mol_type = other RNA
  modified_base 1: mod_base = OTHER; note = 2'-O-methyl-uridine-3'-phosphorothioate
  modified_base 2: mod_base = OTHER; note = 2'-deoxy-2'-fluoro-guanosine-3'-phosphorothioate
  modified_base 3: mod_base = OTHER; note = 2'-O-methyl-uridine-3'-phosphate
  modified_base 4: mod_base = OTHER; note = 2'-O-methyl-adenosine-3'-phosphate
  modified_base 5: mod_base = OTHER; note = 2'-O-methyl-guanosine-3'-phosphate
  modified_base 6: mod_base = OTHER; note = 2'-deoxy-2'-fluoro-adenosine-3'-phosphate
  modified_base 7: mod_base = OTHER; note = 2'-O-methyl-uridine-3'-phosphate
  modified_base 8: mod_base = OTHER; note = 2'-deoxy-2'-fluoro-guanosine-3'-phosphate
  modified_base 9: mod_base = OTHER; note = 2'-deoxy-2'-fluoro-uridine-3'-phosphate
  modified_base 10: mod_base = OTHER; note = 2'-O-methyl-adenosine-3'-phosphate
  modified_base 11: mod_base = OTHER; note = 2'-O-methyl-adenosine-3'-phosphate
  modified_base 12: mod_base = OTHER; note = 2'-O-methyl-uridine-3'-phosphate
  modified_base 13: mod_base = OTHER; note = 2'-O-methyl-adenosine-3'-phosphate
  modified_base 14: mod_base = OTHER; note = 2'-deoxy-2'-fluoro-guanosine-3'-phosphate
  modified_base 15: mod_base = OTHER; note = 2'-O-methyl-adenosine-3'-phosphate
  modified_base 16: mod_base = OTHER; note = 2'-deoxy-2'-fluoro-uridine-3'-phosphate
  modified_base 17: mod_base = OTHER; note = 2'-O-methyl-guanosine-3'-phosphate
  modified_base 18: mod_base = OTHER; note = 2'-O-methyl-guanosine-3'-phosphate
  modified_base 19: mod_base = OTHER; note = 2'-O-methyl-guanosine-3'-phosphorothioate
  modified_base 20: mod_base = OTHER; note = 2'-O-methyl-uridine-3'-phosphorothioate
  modified_base 21: mod_base = OTHER; note = 2'-O-methyl-uridine-3'-phosphate
tgtagatgtaatagatgggtt

SEQ ID NO: 2440 - RNA, 21 nt, synthetic construct
  source 1..21: mol_type = other RNA
  modified_base 1: mod_base = OTHER; note = 2'-O-methyl-uridine-3'-phosphorothioate
  modified_base 2: mod_base = OTHER; note = 2'-deoxy-2'-fluoro-uridine-3'-phosphorothioate
  modified_base 3: mod_base = OTHER; note = 2'-O-methyl-guanosine-3'-phosphate
  modified_base 4: mod_base = OTHER; note = 2'-O-methyl-uridine-3'-phosphate
  modified_base 5: mod_base = OTHER; note = 2'-O-methyl-adenosine-3'-phosphate
  modified_base 6: mod_base = OTHER; note = 2'-deoxy-2'-fluoro-guanosine-3'-phosphate
  modified_base 7: mod_base = OTHER; note = 2'-O-methyl-adenosine-3'-phosphate
  modified_base 8: mod_base = OTHER; note = 2'-deoxy-2'-fluoro-uridine-3'-phosphate
  modified_base 9: mod_base = OTHER; note = 2'-deoxy-2'-fluoro-guanosine-3'-phosphate
  modified_base 10: mod_base = OTHER; note = 2'-O-methyl-uridine-3'-phosphate
  modified_base 11: mod_base = OTHER; note = 2'-O-methyl-adenosine-3'-phosphate
  modified_base 12: mod_base = OTHER; note = 2'-O-methyl-adenosine-3'-phosphate
  modified_base 13: mod_base = OTHER; note = 2'-O-methyl-uridine-3'-phosphate
  modified_base 14: mod_base = OTHER; note = 2'-deoxy-2'-fluoro-adenosine-3'-phosphate
  modified_base 15: mod_base = OTHER; note = 2'-O-methyl-guanosine-3'-phosphate
  modified_base 16: mod_base = OTHER; note = 2'-deoxy-2'-fluoro-adenosine-3'-phosphate
  modified_base 17: mod_base = OTHER; note = 2'-O-methyl-uridine-3'-phosphate
  modified_base 18: mod_base = OTHER; note = 2'-O-methyl-guanosine-3'-phosphate
  modified_base 19: mod_base = OTHER; note = 2'-O-methyl-guanosine-3'-phosphorothioate
  modified_base 20: mod_base = OTHER; note = 2'-O-methyl-uridine-3'-phosphorothioate
  modified_base 21: mod_base = OTHER; note = 2'-O-methyl-uridine-3'-phosphate
ttgtagatgtaatagatggtt

SEQ ID NO: 2441 - RNA, 21 nt, synthetic construct
  source 1..21: mol_type = other RNA
  modified_base 1: mod_base = OTHER; note = 2'-O-methyl-uridine-3'-phosphorothioate
  modified_base 2: mod_base = OTHER; note = 2'-deoxy-2'-fluoro-cytidine-3'-phosphorothioate
  modified_base 3: mod_base = OTHER; note = 2'-O-methyl-uridine-3'-phosphate
  modified_base 4: mod_base = OTHER; note = 2'-O-methyl-guanosine-3'-phosphate
  modified_base 5: mod_base = OTHER; note = 2'-O-methyl-uridine-3'-phosphate
  modified_base 6: mod_base = OTHER; note = 2'-deoxy-2'-fluoro-adenosine-3'-phosphate
  modified_base 7: mod_base = OTHER; note = 2'-O-methyl-guanosine-3'-phosphate
  modified_base 8: mod_base = OTHER; note = 2'-deoxy-2'-fluoro-adenosine-3'-phosphate
  modified_base 9: mod_base = OTHER; note = 2'-deoxy-2'-fluoro-uridine-3'-phosphate
  modified_base 10: mod_base = OTHER; note = 2'-O-methyl-guanosine-3'-phosphate
  modified_base 11: mod_base = OTHER; note = 2'-O-methyl-uridine-3'-phosphate
  modified_base 12: mod_base = OTHER; note = 2'-O-methyl-adenosine-3'-phosphate
  modified_base 13: mod_base = OTHER; note = 2'-O-methyl-adenosine-3'-phosphate
  modified_base 14: mod_base = OTHER; note = 2'-deoxy-2'-fluoro-uridine-3'-phosphate
  modified_base 15: mod_base = OTHER; note = 2'-O-methyl-adenosine-3'-phosphate
  modified_base 16: mod_base = OTHER; note = 2'-deoxy-2'-fluoro-guanosine-3'-phosphate
  modified_base 17: mod_base = OTHER; note = 2'-O-methyl-adenosine-3'-phosphate
  modified_base 18: mod_base = OTHER; note = 2'-O-methyl-uridine-3'-phosphate
  modified_base 19: mod_base = OTHER; note = 2'-O-methyl-guanosine-3'-phosphorothioate
  modified_base 20: mod_base = OTHER; note = 2'-O-methyl-uridine-3'-phosphorothioate
  modified_base 21: mod_base = OTHER; note = 2'-O-methyl-uridine-3'-phosphate
tctgtagatgtaatagatgtt

SEQ ID NO: 2442 - RNA, 21 nt, synthetic construct
  source 1..21: mol_type = other RNA
  modified_base 1: mod_base = OTHER; note = 2'-O-methyl-uridine-3'-phosphorothioate
  modified_base 2: mod_base = OTHER; note = 2'-deoxy-2'-fluoro-guanosine-3'-phosphorothioate
  modified_base 3: mod_base = OTHER; note = 2'-O-methyl-cytidine-3'-phosphate
  modified_base 4: mod_base = OTHER; note = 2'-O-methyl-uridine-3'-phosphate
  modified_base 5: mod_base = OTHER; note = 2'-O-methyl-guanosine-3'-phosphate
  modified_base 6: mod_base = OTHER; note = 2'-deoxy-2'-fluoro-uridine-3'-phosphate
  modified_base 7: mod_base = OTHER; note = 2'-O-methyl-adenosine-3'-phosphate
  modified_base 8: mod_base = OTHER; note = 2'-deoxy-2'-fluoro-guanosine-3'-phosphate
  modified_base 9: mod_base = OTHER; note = 2'-deoxy-2'-fluoro-adenosine-3'-phosphate
  modified_base 10: mod_base = OTHER; note = 2'-O-methyl-uridine-3'-phosphate
  modified_base 11: mod_base = OTHER; note = 2'-O-methyl-guanosine-3'-phosphate
  modified_base 12: mod_base = OTHER; note = 2'-O-methyl-uridine-3'-phosphate
  modified_base 13: mod_base = OTHER; note = 2'-O-methyl-adenosine-3'-phosphate
  modified_base 14: mod_base = OTHER; note = 2'-deoxy-2'-fluoro-adenosine-3'-phosphate
  modified_base 15: mod_base = OTHER; note = 2'-O-methyl-uridine-3'-phosphate
  modified_base 16: mod_base = OTHER; note = 2'-deoxy-2'-fluoro-adenosine-3'-phosphate
  modified_base 17: mod_base = OTHER; note = 2'-O-methyl-guanosine-3'-phosphate
  modified_base 18: mod_base = OTHER; note = 2'-O-methyl-adenosine-3'-phosphate
  modified_base 19: mod_base = OTHER; note = 2'-O-methyl-uridine-3'-phosphorothioate
  modified_base 20: mod_base = OTHER; note = 2'-O-methyl-uridine-3'-phosphorothioate
  modified_base 21: mod_base = OTHER; note = 2'-O-methyl-uridine-3'-phosphate
tgctgtagatgtaatagattt

SEQ ID NO: 2443 - RNA, 21 nt, synthetic construct
  source 1..21: mol_type = other RNA
  modified_base 1: mod_base = OTHER; note = 2'-O-methyl-uridine-3'-phosphorothioate
  modified_base 2: mod_base = OTHER; note = 2'-deoxy-2'-fluoro-adenosine-3'-phosphorothioate
  modified_base 3: mod_base = OTHER; note = 2'-O-methyl-guanosine-3'-phosphate
  modified_base 4: mod_base = OTHER; note = 2'-O-methyl-cytidine-3'-phosphate
  modified_base 5: mod_base = OTHER; note = 2'-O-methyl-uridine-3'-phosphate
  modified_base 6: mod_base = OTHER; note = 2'-deoxy-2'-fluoro-guanosine-3'-phosphate
  modified_base 7: mod_base = OTHER; note = 2'-O-methyl-uridine-3'-phosphate
  modified_base 8: mod_base = OTHER; note = 2'-deoxy-2'-fluoro-adenosine-3'-phosphate
  modified_base 9: mod_base = OTHER; note = 2'-deoxy-2'-fluoro-guanosine-3'-phosphate
  modified_base 10: mod_base = OTHER; note = 2'-O-methyl-adenosine-3'-phosphate
  modified_base 11: mod_base = OTHER; note = 2'-O-methyl-uridine-3'-phosphate
  modified_base 12: mod_base = OTHER; note = 2'-O-methyl-guanosine-3'-phosphate
  modified_base 13: mod_base = OTHER; note = 2'-O-methyl-uridine-3'-phosphate
  modified_base 14: mod_base = OTHER; note = 2'-deoxy-2'-fluoro-adenosine-3'-phosphate
  modified_base 15: mod_base = OTHER; note = 2'-O-methyl-adenosine-3'-phosphate
  modified_base 16: mod_base = OTHER; note = 2'-deoxy-2'-fluoro-uridine-3'-phosphate
  modified_base 17: mod_base = OTHER; note = 2'-O-methyl-adenosine-3'-phosphate
  modified_base 18: mod_base = OTHER; note = 2'-O-methyl-guanosine-3'-phosphate
  modified_base 19: mod_base = OTHER; note = 2'-O-methyl-adenosine-3'-phosphorothioate
  modified_base 20: mod_base = OTHER; note = 2'-O-methyl-uridine-3'-phosphorothioate
  modified_base 21: mod_base = OTHER; note = 2'-O-methyl-uridine-3'-phosphate
tagctgtagatgtaatagatt

SEQ ID NO: 2444 - RNA, 21 nt, synthetic construct
  source 1..21: mol_type = other RNA
  modified_base 1: mod_base = OTHER; note = 2'-O-methyl-uridine-3'-phosphorothioate
  modified_base 2: mod_base = OTHER; note = 2'-deoxy-2'-fluoro-cytidine-3'-phosphorothioate
  modified_base 3: mod_base = OTHER; note = 2'-O-methyl-adenosine-3'-phosphate
  modified_base 4: mod_base = OTHER; note = 2'-O-methyl-guanosine-3'-phosphate
  modified_base 5: mod_base = OTHER; note = 2'-O-methyl-cytidine-3'-phosphate
  modified_base 6: mod_base = OTHER; note = 2'-deoxy-2'-fluoro-uridine-3'-phosphate
  modified_base 7: mod_base = OTHER; note = 2'-O-methyl-guanosine-3'-phosphate
  modified_base 8: mod_base = OTHER; note = 2'-deoxy-2'-fluoro-uridine-3'-phosphate
  modified_base 9: mod_base = OTHER; note = 2'-deoxy-2'-fluoro-adenosine-3'-phosphate
  modified_base 10: mod_base = OTHER; note = 2'-O-methyl-guanosine-3'-phosphate
  modified_base 11: mod_base = OTHER; note = 2'-O-methyl-adenosine-3'-phosphate
  modified_base 12: mod_base = OTHER; note = 2'-O-methyl-uridine-3'-phosphate
  modified_base 13: mod_base = OTHER; note = 2'-O-methyl-guanosine-3'-phosphate
  modified_base 14: mod_base = OTHER; note = 2'-deoxy-2'-fluoro-uridine-3'-phosphate
  modified_base 15: mod_base = OTHER; note = 2'-O-methyl-adenosine-3'-phosphate
  modified_base 16: mod_base = OTHER; note = 2'-deoxy-2'-fluoro-adenosine-3'-phosphate
  modified_base 17: mod_base = OTHER; note = 2'-O-methyl-uridine-3'-phosphate
  modified_base 18: mod_base = OTHER; note = 2'-O-methyl-adenosine-3'-phosphate
  modified_base 19: mod_base = OTHER; note = 2'-O-methyl-guanosine-3'-phosphorothioate
  modified_base 20: mod_base = OTHER; note = 2'-O-methyl-uridine-3'-phosphorothioate
  modified_base 21: mod_base = OTHER; note = 2'-O-methyl-uridine-3'-phosphate
tcagctgtagatgtaatagtt

SEQ ID NO: 2445 - RNA, 21 nt, synthetic construct
  source 1..21: mol_type = other RNA
  modified_base 1: mod_base = OTHER; note = 2'-O-methyl-uridine-3'-phosphorothioate
  modified_base 2: mod_base = OTHER; note = 2'-deoxy-2'-fluoro-uridine-3'-phosphorothioate
  modified_base 3: mod_base = OTHER; note = 2'-O-methyl-cytidine-3'-phosphate
  modified_base 4: mod_base = OTHER; note = 2'-O-methyl-adenosine-3'-phosphate
  modified_base 5: mod_base = OTHER; note = 2'-O-methyl-guanosine-3'-phosphate
  modified_base 6: mod_base = OTHER; note = 2'-deoxy-2'-fluoro-cytidine-3'-phosphate
  modified_base 7: mod_base = OTHER; note = 2'-O-methyl-uridine-3'-phosphate
  modified_base 8: mod_base = OTHER; note = 2'-deoxy-2'-fluoro-guanosine-3'-phosphate
  modified_base 9: mod_base = OTHER; note = 2'-deoxy-2'-fluoro-uridine-3'-phosphate
  modified_base 10: mod_base = OTHER; note = 2'-O-methyl-adenosine-3'-phosphate
  modified_base 11: mod_base = OTHER; note = 2'-O-methyl-guanosine-3'-phosphate
  modified_base 12: mod_base = OTHER; note = 2'-O-methyl-adenosine-3'-phosphate
  modified_base 13: mod_base = OTHER; note = 2'-O-methyl-uridine-3'-phosphate
  modified_base 14: mod_base = OTHER; note = 2'-deoxy-2'-fluoro-guanosine-3'-phosphate
  modified_base 15: mod_base = OTHER; note = 2'-O-methyl-uridine-3'-phosphate
  modified_base 16: mod_base = OTHER; note = 2'-deoxy-2'-fluoro-adenosine-3'-phosphate
  modified_base 17: mod_base = OTHER; note = 2'-O-methyl-adenosine-3'-phosphate
  modified_base 18: mod_base = OTHER; note = 2'-O-methyl-uridine-3'-phosphate
  modified_base 19: mod_base = OTHER; note = 2'-O-methyl-adenosine-3'-phosphorothioate
  modified_base 20: mod_base = OTHER; note = 2'-O-methyl-uridine-3'-phosphorothioate
  modified_base 21: mod_base = OTHER; note = 2'-O-methyl-uridine-3'-phosphate
ttcagctgtagatgtaatatt

SEQ ID NO: 2446 - RNA, 21 nt, synthetic construct
  source 1..21: mol_type = other RNA
  modified_base 1: mod_base = OTHER; note = 2'-O-methyl-uridine-3'-phosphorothioate
  modified_base 2: mod_base = OTHER; note = 2'-deoxy-2'-fluoro-guanosine-3'-phosphorothioate
  modified_base 3: mod_base = OTHER; note = 2'-O-methyl-uridine-3'-phosphate
  modified_base 4: mod_base = OTHER; note = 2'-O-methyl-cytidine-3'-phosphate
  modified_base 5: mod_base = OTHER; note = 2'-O-methyl-adenosine-3'-phosphate
  modified_base 6: mod_base = OTHER; note = 2'-deoxy-2'-fluoro-guanosine-3'-phosphate
  modified_base 7: mod_base = OTHER; note = 2'-O-methyl-cytidine-3'-phosphate
  modified_base 8: mod_base = OTHER; note = 2'-deoxy-2'-fluoro-uridine-3'-phosphate
  modified_base 9: mod_base = OTHER; note = 2'-deoxy-2'-fluoro-guanosine-3'-phosphate
  modified_base 10: mod_base = OTHER; note = 2'-O-methyl-uridine-3'-phosphate
  modified_base 11: mod_base = OTHER; note = 2'-O-methyl-adenosine-3'-phosphate
  modified_base 12: mod_base = OTHER; note = 2'-O-methyl-guanosine-3'-phosphate
  modified_base 13: mod_base = OTHER; note = 2'-O-methyl-adenosine-3'-phosphate
  modified_base 14: mod_base = OTHER; note = 2'-deoxy-2'-fluoro-uridine-3'-phosphate
  modified_base 15: mod_base = OTHER; note = 2'-O-methyl-guanosine-3'-phosphate
  modified_base 16: mod_base = OTHER; note = 2'-deoxy-2'-fluoro-uridine-3'-phosphate
  modified_base 17: mod_base = OTHER; note = 2'-O-methyl-adenosine-3'-phosphate
  modified_base 18: mod_base = OTHER; note = 2'-O-methyl-adenosine-3'-phosphate
  modified_base 19: mod_base = OTHER; note = 2'-O-methyl-uridine-3'-phosphorothioate
  modified_base 20: mod_base = OTHER; note = 2'-O-methyl-uridine-3'-phosphorothioate
  modified_base 21: mod_base = OTHER; note = 2'-O-methyl-uridine-3'-phosphate
tgtcagctgtagatgtaattt

SEQ ID NO: 2447 - RNA, 21 nt, synthetic construct
  source 1..21: mol_type = other RNA
  modified_base 1: mod_base = OTHER; note = 2'-O-methyl-uridine-3'-phosphorothioate
  modified_base 2: mod_base = OTHER; note = 2'-deoxy-2'-fluoro-guanosine-3'-phosphorothioate
  modified_base 3: mod_base = OTHER; note = 2'-O-methyl-guanosine-3'-phosphate
  modified_base 4: mod_base = OTHER; note = 2'-O-methyl-uridine-3'-phosphate
  modified_base 5: mod_base = OTHER; note = 2'-O-methyl-cytidine-3'-phosphate
  modified_base 6: mod_base = OTHER; note = 2'-deoxy-2'-fluoro-adenosine-3'-phosphate
  modified_base 7: mod_base = OTHER; note = 2'-O-methyl-guanosine-3'-phosphate
  modified_base 8: mod_base = OTHER; note = 2'-deoxy-2'-fluoro-cytidine-3'-phosphate
  modified_base 9: mod_base = OTHER; note = 2'-deoxy-2'-fluoro-uridine-3'-phosphate
  modified_base 10: mod_base = OTHER; note = 2'-O-methyl-guanosine-3'-phosphate
  modified_base 11: mod_base = OTHER; note = 2'-O-methyl-uridine-3'-phosphate
  modified_base 12: mod_base = OTHER; note = 2'-O-methyl-adenosine-3'-phosphate
  modified_base 13: mod_base = OTHER; note = 2'-O-methyl-guanosine-3'-phosphate
  modified_base 14: mod_base = OTHER; note = 2'-deoxy-2'-fluoro-adenosine-3'-phosphate
  modified_base 15: mod_base = OTHER; note = 2'-O-methyl-uridine-3'-phosphate
  modified_base 16: mod_base = OTHER; note = 2'-deoxy-2'-fluoro-guanosine-3'-phosphate
  modified_base 17: mod_base = OTHER; note = 2'-O-methyl-uridine-3'-phosphate
  modified_base 18: mod_base = OTHER; note = 2'-O-methyl-adenosine-3'-phosphate
  modified_base 19: mod_base = OTHER; note = 2'-O-methyl-adenosine-3'-phosphorothioate
  modified_base 20: mod_base = OTHER; note = 2'-O-methyl-uridine-3'-phosphorothioate
  modified_base 21: mod_base = OTHER; note = 2'-O-methyl-uridine-3'-phosphate
tggtcagctgtagatgtaatt

SEQ ID NO: 2448 - RNA, 21 nt, synthetic construct
  source 1..21: mol_type = other RNA
  modified_base 1: mod_base = OTHER; note = 2'-O-methyl-uridine-3'-phosphorothioate
  modified_base 2: mod_base = OTHER; note = 2'-deoxy-2'-fluoro-guanosine-3'-phosphorothioate
  modified_base 3: mod_base = OTHER; note = 2'-O-methyl-guanosine-3'-phosphate
  modified_base 4: mod_base = OTHER; note = 2'-O-methyl-guanosine-3'-phosphate
  modified_base 5: mod_base = OTHER; note = 2'-O-methyl-uridine-3'-phosphate
  modified_base 6: mod_base = OTHER; note = 2'-deoxy-2'-fluoro-cytidine-3'-phosphate
  modified_base 7: mod_base = OTHER; note = 2'-O-methyl-adenosine-3'-phosphate
  modified_base 8: mod_base = OTHER; note = 2'-deoxy-2'-fluoro-guanosine-3'-phosphate
  modified_base 9: mod_base = OTHER; note = 2'-deoxy-2'-fluoro-cytidine-3'-phosphate
  modified_base 10: mod_base = OTHER; note = 2'-O-methyl-uridine-3'-phosphate
  modified_base 11: mod_base = OTHER; note = 2'-O-methyl-guanosine-3'-phosphate
  modified_base 12: mod_base = OTHER; note = 2'-O-methyl-uridine-3'-phosphate
  modified_base 13: mod_base = OTHER; note = 2'-O-methyl-adenosine-3'-phosphate
  modified_base 14: mod_base = OTHER; note = 2'-deoxy-2'-fluoro-guanosine-3'-phosphate
  modified_base 15: mod_base = OTHER; note = 2'-O-methyl-adenosine-3'-phosphate
  modified_base 16: mod_base = OTHER; note = 2'-deoxy-2'-fluoro-uridine-3'-phosphate
  modified_base 17: mod_base = OTHER; note = 2'-O-methyl-guanosine-3'-phosphate
  modified_base 18: mod_base = OTHER; note = 2'-O-methyl-uridine-3'-phosphate
  modified_base 19: mod_base = OTHER; note = 2'-O-methyl-adenosine-3'-phosphorothioate
  modified_base 20: mod_base = OTHER; note = 2'-O-methyl-uridine-3'-phosphorothioate
  modified_base 21: mod_base = OTHER; note = 2'-O-methyl-uridine-3'-phosphate
tgggtcagctgtagatgtatt

SEQ ID NO: 2449 - RNA, 21 nt, synthetic construct
  source 1..21: mol_type = other RNA
  modified_base 1: mod_base = OTHER; note = 2'-O-methyl-uridine-3'-phosphorothioate
  modified_base 2: mod_base = OTHER; note = 2'-deoxy-2'-fluoro-adenosine-3'-phosphorothioate
  modified_base 3: mod_base = OTHER; note = 2'-O-methyl-guanosine-3'-phosphate
  modified_base 4: mod_base = OTHER; note = 2'-O-methyl-guanosine-3'-phosphate
  modified_base 5: mod_base = OTHER; note = 2'-O-methyl-guanosine-3'-phosphate
  modified_base 6: mod_base = OTHER; note = 2'-deoxy-2'-fluoro-uridine-3'-phosphate
  modified_base 7: mod_base = OTHER; note = 2'-O-methyl-cytidine-3'-phosphate
  modified_base 8: mod_base = OTHER; note = 2'-deoxy-2'-fluoro-adenosine-3'-phosphate
  modified_base 9: mod_base = OTHER; note = 2'-deoxy-2'-fluoro-guanosine-3'-phosphate
  modified_base 10: mod_base = OTHER; note = 2'-O-methyl-cytidine-3'-phosphate
  modified_base 11: mod_base = OTHER; note = 2'-O-methyl-uridine-3'-phosphate
  modified_base 12: mod_base = OTHER; note = 2'-O-methyl-guanosine-3'-phosphate
  modified_base 13: mod_base = OTHER; note = 2'-O-methyl-uridine-3'-phosphate
  modified_base 14: mod_base = OTHER; note = 2'-deoxy-2'-fluoro-adenosine-3'-phosphate
  modified_base 15: mod_base = OTHER; note = 2'-O-methyl-guanosine-3'-phosphate
  modified_base 16: mod_base = OTHER; note = 2'-deoxy-2'-fluoro-adenosine-3'-phosphate
  modified_base 17: mod_base = OTHER; note = 2'-O-methyl-uridine-3'-phosphate
  modified_base 18: mod_base = OTHER; note = 2'-O-methyl-guanosine-3'-phosphate
  modified_base 19: mod_base = OTHER; note = 2'-O-methyl-uridine-3'-phosphorothioate
  modified_base 20: mod_base = OTHER; note = 2'-O-methyl-uridine-3'-phosphorothioate
  modified_base 21: mod_base = OTHER; note = 2'-O-methyl-uridine-3'-phosphate
tagggtcagctgtagatgttt

SEQ ID NO: 2450 - RNA, 21 nt, synthetic construct
  source 1..21: mol_type = other RNA
  modified_base 1: mod_base = OTHER; note = 2'-O-methyl-uridine-3'-phosphorothioate
  modified_base 2: mod_base = OTHER; note = 2'-deoxy-2'-fluoro-adenosine-3'-phosphorothioate
  modified_base 3: mod_base = OTHER; note = 2'-O-methyl-adenosine-3'-phosphate
  modified_base 4: mod_base = OTHER; note = 2'-O-methyl-guanosine-3'-phosphate
  modified_base 5: mod_base = OTHER; note = 2'-O-methyl-guanosine-3'-phosphate
  modified_base 6: mod_base = OTHER; note = 2'-deoxy-2'-fluoro-guanosine-3'-phosphate
  modified_base 7: mod_base = OTHER; note = 2'-O-methyl-uridine-3'-phosphate
  modified_base 8: mod_base = OTHER; note = 2'-deoxy-2'-fluoro-cytidine-3'-phosphate
  modified_base 9: mod_base = OTHER; note = 2'-deoxy-2'-fluoro-adenosine-3'-phosphate
  modified_base 10: mod_base = OTHER; note = 2'-O-methyl-guanosine-3'-phosphate
  modified_base 11: mod_base = OTHER; note = 2'-O-methyl-cytidine-3'-phosphate
  modified_base 12: mod_base = OTHER; note = 2'-O-methyl-uridine-3'-phosphate
  modified_base 13: mod_base = OTHER; note = 2'-O-methyl-guanosine-3'-phosphate
  modified_base 14: mod_base = OTHER; note = 2'-deoxy-2'-fluoro-uridine-3'-phosphate
  modified_base 15: mod_base = OTHER; note = 2'-O-methyl-adenosine-3'-phosphate
  modified_base 16: mod_base = OTHER; note = 2'-deoxy-2'-fluoro-guanosine-3'-phosphate
  modified_base 17: mod_base = OTHER; note = 2'-O-methyl-adenosine-3'-phosphate
  modified_base 18: mod_base = OTHER; note = 2'-O-methyl-uridine-3'-phosphate
  modified_base 19: mod_base = OTHER; note = 2'-O-methyl-guanosine-3'-phosphorothioate
  modified_base 20: mod_base = OTHER; note = 2'-O-methyl-uridine-3'-phosphorothioate
  modified_base 21: mod_base = OTHER; note = 2'-O-methyl-uridine-3'-phosphate
taagggtcagctgtagatgtt

SEQ ID NO: 2451 - RNA, 21 nt, synthetic construct
  source 1..21: mol_type = other RNA
  modified_base 1: mod_base = OTHER; note = 2'-O-methyl-uridine-3'-phosphorothioate
  modified_base 2: mod_base = OTHER; note = 2'-deoxy-2'-fluoro-cytidine-3'-phosphorothioate
  modified_base 3: mod_base = OTHER; note = 2'-O-methyl-adenosine-3'-phosphate
  modified_base 4: mod_base = OTHER; note = 2'-O-methyl-adenosine-3'-phosphate
  modified_base 5: mod_base = OTHER; note = 2'-O-methyl-guanosine-3'-phosphate
  modified_base 6: mod_base = OTHER; note = 2'-deoxy-2'-fluoro-guanosine-3'-phosphate
  modified_base 7: mod_base = OTHER; note = 2'-O-methyl-guanosine-3'-phosphate
  modified_base 8: mod_base = OTHER; note = 2'-deoxy-2'-fluoro-uridine-3'-phosphate
  modified_base 9: mod_base = OTHER; note = 2'-deoxy-2'-fluoro-cytidine-3'-phosphate
  modified_base 10: mod_base = OTHER; note = 2'-O-methyl-adenosine-3'-phosphate
  modified_base 11: mod_base = OTHER; note = 2'-O-methyl-guanosine-3'-phosphate
  modified_base 12: mod_base = OTHER; note = 2'-O-methyl-cytidine-3'-phosphate
  modified_base 13: mod_base = OTHER; note = 2'-O-methyl-uridine-3'-phosphate
  modified_base 14: mod_base = OTHER; note = 2'-deoxy-2'-fluoro-guanosine-3'-phosphate
  modified_base 15: mod_base = OTHER; note = 2'-O-methyl-uridine-3'-phosphate
  modified_base 16: mod_base = OTHER; note = 2'-deoxy-2'-fluoro-adenosine-3'-phosphate
  modified_base 17: mod_base = OTHER; note = 2'-O-methyl-guanosine-3'-phosphate
  modified_base 18: mod_base = OTHER; note = 2'-O-methyl-adenosine-3'-phosphate
  modified_base 19: mod_base = OTHER; note = 2'-O-methyl-uridine-3'-phosphorothioate
  modified_base 20: mod_base = OTHER; note = 2'-O-methyl-uridine-3'-phosphorothioate
  modified_base 21: mod_base = OTHER; note = 2'-O-methyl-uridine-3'-phosphate
tcaagggtcagctgtagattt

SEQ ID NO: 2452 - RNA, 21 nt, synthetic construct
  source 1..21: mol_type = other RNA
  modified_base 1: mod_base = OTHER; note = 2'-O-methyl-uridine-3'-phosphorothioate
  modified_base 2: mod_base = OTHER; note = 2'-deoxy-2'-fluoro-guanosine-3'-phosphorothioate
  modified_base 3: mod_base = OTHER; note = 2'-O-methyl-uridine-3'-phosphate
  modified_base 4: mod_base = OTHER; note = 2'-O-methyl-cytidine-3'-phosphate
  modified_base 5: mod_base = OTHER; note = 2'-O-methyl-adenosine-3'-phosphate
  modified_base 6: mod_base = OTHER; note = 2'-deoxy-2'-fluoro-guanosine-3'-phosphate
  modified_base 7: mod_base = OTHER; note = 2'-O-methyl-cytidine-3'-phosphate
  modified_base 8: mod_base = OTHER; note = 2'-deoxy-2'-fluoro-uridine-3'-phosphate
  modified_base 9: mod_base = OTHER; note = 2'-deoxy-2'-fluoro-cytidine-3'-phosphate
  modified_base 10: mod_base = OTHER; note = 2'-O-methyl-cytidine-3'-phosphate
  modified_base 11: mod_base = OTHER; note = 2'-O-methyl-cytidine-3'-phosphate
  modified_base 12: mod_base = OTHER; note = 2'-O-methyl-cytidine-3'-phosphate
  modified_base 13: mod_base = OTHER; note = 2'-O-methyl-uridine-3'-phosphate
  modified_base 14: mod_base = OTHER; note = 2'-deoxy-2'-fluoro-adenosine-3'-phosphate
  modified_base 15: mod_base = OTHER; note = 2'-O-methyl-adenosine-3'-phosphate
  modified_base 16: mod_base = OTHER; note = 2'-deoxy-2'-fluoro-cytidine-3'-phosphate
  modified_base 17: mod_base = OTHER; note = 2'-O-methyl-cytidine-3'-phosphate
  modified_base 18: mod_base = OTHER; note = 2'-O-methyl-cytidine-3'-phosphate
  modified_base 19: mod_base = OTHER; note = 2'-O-methyl-cytidine-3'-phosphorothioate
  modified_base 20: mod_base = OTHER; note = 2'-O-methyl-uridine-3'-phosphorothioate
  modified_base 21: mod_base = OTHER; note = 2'-O-methyl-uridine-3'-phosphate
tgtcagctcccctaacccctt

SEQ ID NO: 2453 - RNA, 21 nt, synthetic construct
  source 1..21: mol_type = other RNA
  modified_base 1: mod_base = OTHER; note = 2'-O-methyl-uridine-3'-phosphorothioate
  modified_base 2: mod_base = OTHER; note = 2'-deoxy-2'-fluoro-uridine-3'-phosphorothioate
  modified_base 3: mod_base = OTHER; note = 2'-O-methyl-guanosine-3'-phosphate
  modified_base 4: mod_base = OTHER; note = 2'-O-methyl-uridine-3'-phosphate
  modified_base 5: mod_base = OTHER; note = 2'-O-methyl-cytidine-3'-phosphate
  modified_base 6: mod_base = OTHER; note = 2'-deoxy-2'-fluoro-adenosine-3'-phosphate
  modified_base 7: mod_base = OTHER; note = 2'-O-methyl-guanosine-3'-phosphate
  modified_base 8: mod_base = OTHER; note = 2'-deoxy-2'-fluoro-cytidine-3'-phosphate
  modified_base 9: mod_base = OTHER; note = 2'-deoxy-2'-fluoro-uridine-3'-phosphate
  modified_base 10: mod_base = OTHER; note = 2'-O-methyl-cytidine-3'-phosphate
  modified_base 11: mod_base = OTHER; note = 2'-O-methyl-cytidine-3'-phosphate
  modified_base 12: mod_base = OTHER; note = 2'-O-methyl-cytidine-3'-phosphate
  modified_base 13: mod_base = OTHER; note = 2'-O-methyl-cytidine-3'-phosphate
  modified_base 14: mod_base = OTHER; note = 2'-deoxy-2'-fluoro-uridine-3'-phosphate
  modified_base 15: mod_base = OTHER; note = 2'-O-methyl-adenosine-3'-phosphate
  modified_base 16: mod_base = OTHER; note = 2'-deoxy-2'-fluoro-adenosine-3'-phosphate
  modified_base 17: mod_base = OTHER; note = 2'-O-methyl-cytidine-3'-phosphate
  modified_base 18: mod_base = OTHER; note = 2'-O-methyl-cytidine-3'-phosphate
  modified_base 19: mod_base = OTHER; note = 2'-O-methyl-cytidine-3'-phosphorothioate
  modified_base 20: mod_base = OTHER; note = 2'-O-methyl-uridine-3'-phosphorothioate
  modified_base 21: mod_base = OTHER; note = 2'-O-methyl-uridine-3'-phosphate
ttgtcagctcccctaaccctt

SEQ ID NO: 2454 - RNA, 21 nt, synthetic construct
  source 1..21: mol_type = other RNA
  modified_base 1: mod_base = OTHER; note = 2'-O-methyl-uridine-3'-phosphorothioate
  modified_base 2: mod_base = OTHER; note = 2'-deoxy-2'-fluoro-uridine-3'-phosphorothioate
  modified_base 3: mod_base = OTHER; note = 2'-O-methyl-uridine-3'-phosphate
  modified_base 4: mod_base = OTHER; note = 2'-O-methyl-guanosine-3'-phosphate
  modified_base 5: mod_base = OTHER; note = 2'-O-methyl-uridine-3'-phosphate
  modified_base 6: mod_base = OTHER; note = 2'-deoxy-2'-fluoro-cytidine-3'-phosphate
  modified_base 7: mod_base = OTHER; note = 2'-O-methyl-adenosine-3'-phosphate
  modified_base 8: mod_base = OTHER; note = 2'-deoxy-2'-fluoro-guanosine-3'-phosphate
  modified_base 9: mod_base = OTHER; note = 2'-deoxy-2'-fluoro-cytidine-3'-phosphate
  modified_base 10: mod_base = OTHER; note = 2'-O-methyl-uridine-3'-phosphate
  modified_base 11: mod_base = OTHER; note = 2'-O-methyl-cytidine-3'-phosphate
  modified_base 12: mod_base = OTHER; note = 2'-O-methyl-cytidine-3'-phosphate
  modified_base 13: mod_base = OTHER; note = 2'-O-methyl-cytidine-3'-phosphate
  modified_base 14: mod_base = OTHER; note = 2'-deoxy-2'-fluoro-cytidine-3'-phosphate
  modified_base 15: mod_base = OTHER; note = 2'-O-methyl-uridine-3'-phosphate
  modified_base 16: mod_base = OTHER; note = 2'-deoxy-2'-fluoro-adenosine-3'-phosphate
  modified_base 17: mod_base = OTHER; note = 2'-O-methyl-adenosine-3'-phosphate
  modified_base 18: mod_base = OTHER; note = 2'-O-methyl-cytidine-3'-phosphate
  modified_base 19: mod_base = OTHER; note = 2'-O-methyl-cytidine-3'-phosphorothioate
  modified_base 20: mod_base = OTHER; note = 2'-O-methyl-uridine-3'-phosphorothioate
  modified_base 21: mod_base = OTHER; note = 2'-O-methyl-uridine-3'-phosphate
tttgtcagctcccctaacctt

SEQ ID NO: 2455 - RNA, 21 nt, synthetic construct
  source 1..21: mol_type = other RNA
  modified_base 1: mod_base = OTHER; note = 2'-O-methyl-uridine-3'-phosphorothioate
  modified_base 2: mod_base = OTHER; note = 2'-deoxy-2'-fluoro-adenosine-3'-phosphorothioate
  modified_base 3: mod_base = OTHER; note = 2'-O-methyl-uridine-3'-phosphate
  modified_base 4: mod_base = OTHER; note = 2'-O-methyl-uridine-3'-phosphate
  modified_base 5: mod_base = OTHER; note = 2'-O-methyl-guanosine-3'-phosphate
  modified_base 6: mod_base = OTHER; note = 2'-deoxy-2'-fluoro-uridine-3'-phosphate
  modified_base 7: mod_base = OTHER; note = 2'-O-methyl-cytidine-3'-phosphate
  modified_base 8: mod_base = OTHER; note = 2'-deoxy-2'-fluoro-adenosine-3'-phosphate
  modified_base 9: mod_base = OTHER; note = 2'-deoxy-2'-fluoro-guanosine-3'-phosphate
  modified_base 10: mod_base = OTHER; note = 2'-O-methyl-cytidine-3'-phosphate
  modified_base 11: mod_base = OTHER; note = 2'-O-methyl-uridine-3'-phosphate
  modified_base 12: mod_base = OTHER; note = 2'-O-methyl-cytidine-3'-phosphate
  modified_base 13: mod_base = OTHER; note = 2'-O-methyl-cytidine-3'-phosphate
  modified_base 14: mod_base = OTHER; note = 2'-deoxy-2'-fluoro-cytidine-3'-phosphate
  modified_base 15: mod_base = OTHER; note = 2'-O-methyl-cytidine-3'-phosphate
  modified_base 16: mod_base = OTHER; note = 2'-deoxy-2'-fluoro-uridine-3'-phosphate
  modified_base 17: mod_base = OTHER; note = 2'-O-methyl-adenosine-3'-phosphate
  modified_base 18: mod_base = OTHER; note = 2'-O-methyl-adenosine-3'-phosphate
  modified_base 19: mod_base = OTHER; note = 2'-O-methyl-cytidine-3'-phosphorothioate
  modified_base 20: mod_base = OTHER; note = 2'-O-methyl-uridine-3'-phosphorothioate
  modified_base 21: mod_base = OTHER; note = 2'-O-methyl-uridine-3'-phosphate
tattgtcagctcccctaactt

SEQ ID NO: 2456 - RNA, 21 nt, synthetic construct
  source 1..21: mol_type = other RNA
  modified_base 1: mod_base = OTHER; note = 2'-O-methyl-uridine-3'-phosphorothioate
  modified_base 2: mod_base = OTHER; note = 2'-deoxy-2'-fluoro-uridine-3'-phosphorothioate
  modified_base 3: mod_base = OTHER; note = 2'-O-methyl-adenosine-3'-phosphate
  modified_base 4: mod_base = OTHER; note = 2'-O-methyl-guanosine-3'-phosphate
  modified_base 5: mod_base = OTHER; note = 2'-O-methyl-guanosine-3'-phosphate
  modified_base 6: mod_base = OTHER; note = 2'-deoxy-2'-fluoro-uridine-3'-phosphate
  modified_base 7: mod_base = OTHER; note = 2'-O-methyl-adenosine-3'-phosphate
  modified_base 8: mod_base = OTHER; note = 2'-deoxy-2'-fluoro-guanosine-3'-phosphate
  modified_base 9: mod_base = OTHER; note = 2'-deoxy-2'-fluoro-uridine-3'-phosphate
  modified_base 10: mod_base = OTHER; note = 2'-O-methyl-uridine-3'-phosphate
  modified_base 11: mod_base = OTHER; note = 2'-O-methyl-adenosine-3'-phosphate
  modified_base 12: mod_base = OTHER; note = 2'-O-methyl-adenosine-3'-phosphate
  modified_base 13: mod_base = OTHER; note = 2'-O-methyl-guanosine-3'-phosphate
  modified_base 14: mod_base = OTHER; note = 2'-deoxy-2'-fluoro-adenosine-3'-phosphate
  modified_base 15: mod_base = OTHER; note = 2'-O-methyl-uridine-3'-phosphate
  modified_base 16: mod_base = OTHER; note = 2'-deoxy-2'-fluoro-uridine-3'-phosphate
  modified_base 17: mod_base = OTHER; note = 2'-O-methyl-uridine-3'-phosphate
  modified_base 18: mod_base = OTHER; note = 2'-O-methyl-uridine-3'-phosphate
  modified_base 19: mod_base = OTHER; note = 2'-O-methyl-guanosine-3'-phosphorothioate
  modified_base 20: mod_base = OTHER; note = 2'-O-methyl-uridine-3'-phosphorothioate
  modified_base 21: mod_base = OTHER; note = 2'-O-methyl-uridine-3'-phosphate
ttaggtagttaagattttgtt

SEQ ID NO: 2457 - RNA, 21 nt, synthetic construct
  source 1..21: mol_type = other RNA
  modified_base 1: mod_base = OTHER; note = 2'-O-methyl-uridine-3'-phosphorothioate
  modified_base 2: mod_base = OTHER; note = 2'-deoxy-2'-fluoro-uridine-3'-phosphorothioate
  modified_base 3: mod_base = OTHER; note = 2'-O-methyl-adenosine-3'-phosphate
  modified_base 4: mod_base = OTHER; note = 2'-O-methyl-uridine-3'-phosphate
  modified_base 5: mod_base = OTHER; note = 2'-O-methyl-uridine-3'-phosphate
  modified_base 6: mod_base = OTHER; note = 2'-deoxy-2'-fluoro-adenosine-3'-phosphate
  modified_base 7: mod_base = OTHER; note = 2'-O-methyl-guanosine-3'-phosphate
  modified_base 8: mod_base = OTHER; note = 2'-deoxy-2'-fluoro-guanosine-3'-phosphate
  modified_base 9: mod_base = OTHER; note = 2'-deoxy-2'-fluoro-uridine-3'-phosphate
  modified_base 10: mod_base = OTHER; note = 2'-O-methyl-adenosine-3'-phosphate
  modified_base 11: mod_base = OTHER; note = 2'-O-methyl-guanosine-3'-phosphate
  modified_base 12: mod_base = OTHER; note = 2'-O-methyl-uridine-3'-phosphate
  modified_base 13: mod_base = OTHER; note = 2'-O-methyl-uridine-3'-phosphate
  modified_base 14: mod_base = OTHER; note = 2'-deoxy-2'-fluoro-adenosine-3'-phosphate
  modified_base 15: mod_base = OTHER; note = 2'-O-methyl-adenosine-3'-phosphate
  modified_base 16: mod_base = OTHER; note = 2'-deoxy-2'-fluoro-guanosine-3'-phosphate
  modified_base 17: mod_base = OTHER; note = 2'-O-methyl-adenosine-3'-phosphate
  modified_base 18: mod_base = OTHER; note = 2'-O-methyl-uridine-3'-phosphate
  modified_base 19: mod_base = OTHER; note = 2'-O-methyl-uridine-3'-phosphorothioate
  modified_base 20: mod_base = OTHER; note = 2'-O-methyl-uridine-3'-phosphorothioate
  modified_base 21: mod_base = OTHER; note = 2'-O-methyl-uridine-3'-phosphate
ttattaggtagttaagatttt

SEQ ID NO: 2458 - RNA, 21 nt, synthetic construct
  source 1..21: mol_type = other RNA
  modified_base 1: mod_base = OTHER; note = 2'-O-methyl-uridine-3'-phosphorothioate
  modified_base 2: mod_base = OTHER; note = 2'-deoxy-2'-fluoro-cytidine-3'-phosphorothioate
  modified_base 3: mod_base = OTHER; note = 2'-O-methyl-uridine-3'-phosphate
  modified_base 4: mod_base = OTHER; note = 2'-O-methyl-adenosine-3'-phosphate
  modified_base 5: mod_base = OTHER; note = 2'-O-methyl-uridine-3'-phosphate
  modified_base 6: mod_base = OTHER; note = 2'-deoxy-2'-fluoro-uridine-3'-phosphate
  modified_base 7: mod_base = OTHER; note = 2'-O-methyl-adenosine-3'-phosphate
  modified_base 8: mod_base = OTHER; note = 2'-deoxy-2'-fluoro-guanosine-3'-phosphate
  modified_base 9: mod_base = OTHER; note = 2'-deoxy-2'-fluoro-guanosine-3'-phosphate
  modified_base 10: mod_base = OTHER; note = 2'-O-methyl-uridine-3'-phosphate
  modified_base 11: mod_base = OTHER; note = 2'-O-methyl-adenosine-3'-phosphate
  modified_base 12: mod_base = OTHER; note = 2'-O-methyl-guanosine-3'-phosphate
  modified_base 13: mod_base = OTHER; note = 2'-O-methyl-uridine-3'-phosphate
  modified_base 14: mod_base = OTHER; note = 2'-deoxy-2'-fluoro-uridine-3'-phosphate
  modified_base 15: mod_base = OTHER; note = 2'-O-methyl-adenosine-3'-phosphate
  modified_base 16: mod_base = OTHER; note = 2'-deoxy-2'-fluoro-adenosine-3'-phosphate
  modified_base 17: mod_base = OTHER; note = 2'-O-methyl-guanosine-3'-phosphate
  modified_base 18: mod_base = OTHER; note = 2'-O-methyl-adenosine-3'-phosphate
  modified_base 19: mod_base = OTHER; note = 2'-O-methyl-uridine-3'-phosphorothioate
  modified_base 20: mod_base = OTHER; note = 2'-O-methyl-uridine-3'-phosphorothioate
  modified_base 21: mod_base = OTHER; note = 2'-O-methyl-uridine-3'-phosphate
tctattaggtagttaagattt

SEQ ID NO: 2459 - RNA, 21 nt, synthetic construct
  source 1..21: mol_type = other RNA
  modified_base 1: mod_base = OTHER; note = 2'-O-methyl-uridine-3'-phosphorothioate
  modified_base 2: mod_base = OTHER; note = 2'-deoxy-2'-fluoro-adenosine-3'-phosphorothioate
  modified_base 3: mod_base = OTHER; note = 2'-O-methyl-guanosine-3'-phosphate
  modified_base 4: mod_base = OTHER; note = 2'-O-methyl-guanosine-3'-phosphate
  modified_base 5: mod_base = OTHER; note = 2'-O-methyl-cytidine-3'-phosphate
  modified_base 6: mod_base = OTHER; note = 2'-deoxy-2'-fluoro-uridine-3'-phosphate
  modified_base 7: mod_base = OTHER; note = 2'-O-methyl-adenosine-3'-phosphate
  modified_base 8: mod_base = OTHER; note = 2'-deoxy-2'-fluoro-uridine-3'-phosphate
  modified_base 9: mod_base = OTHER; note = 2'-deoxy-2'-fluoro-uridine-3'-phosphate
  modified_base 10: mod_base = OTHER; note = 2'-O-methyl-adenosine-3'-phosphate
  modified_base 11: mod_base = OTHER; note = 2'-O-methyl-guanosine-3'-phosphate
  modified_base 12: mod_base = OTHER; note = 2'-O-methyl-guanosine-3'-phosphate
  modified_base 13: mod_base = OTHER; note = 2'-O-methyl-uridine-3'-phosphate
  modified_base 14: mod_base = OTHER; note = 2'-deoxy-2'-fluoro-adenosine-3'-phosphate
  modified_base 15: mod_base = OTHER; note = 2'-O-methyl-guanosine-3'-phosphate
  modified_base 16: mod_base = OTHER; note = 2'-deoxy-2'-fluoro-uridine-3'-phosphate
  modified_base 17: mod_base = OTHER; note = 2'-O-methyl-uridine-3'-phosphate
  modified_base 18: mod_base = OTHER; note = 2'-O-methyl-adenosine-3'-phosphate
  modified_base 19: mod_base = OTHER; note = 2'-O-methyl-adenosine-3'-phosphorothioate
  modified_base 20: mod_base = OTHER; note = 2'-O-methyl-uridine-3'-phosphorothioate
  modified_base 21: mod_base = OTHER; note = 2'-O-methyl-uridine-3'-phosphate
taggctattaggtagttaatt

SEQ ID NO: 2460 - RNA, 21 nt, synthetic construct
  source 1..21: mol_type = other RNA
  modified_base 1: mod_base = OTHER; note = 2'-O-methyl-uridine-3'-phosphorothioate
  modified_base 2: mod_base = OTHER; note = 2'-deoxy-2'-fluoro-uridine-3'-phosphorothioate
  modified_base 3: mod_base = OTHER; note = 2'-O-methyl-adenosine-3'-phosphate
  modified_base 4: mod_base = OTHER; note = 2'-O-methyl-guanosine-3'-phosphate
  modified_base 5: mod_base = OTHER; note = 2'-O-methyl-guanosine-3'-phosphate
  modified_base 6: mod_base = OTHER; note = 2'-deoxy-2'-fluoro-cytidine-3'-phosphate
  modified_base 7: mod_base = OTHER; note = 2'-O-methyl-uridine-3'-phosphate
  modified_base 8: mod_base = OTHER; note = 2'-deoxy-2'-fluoro-adenosine-3'-phosphate
  modified_base 9: mod_base = OTHER; note = 2'-deoxy-2'-fluoro-uridine-3'-phosphate
  modified_base 10: mod_base = OTHER; note = 2'-O-methyl-uridine-3'-phosphate
  modified_base 11: mod_base = OTHER; note = 2'-O-methyl-adenosine-3'-phosphate
  modified_base 12: mod_base = OTHER; note = 2'-O-methyl-guanosine-3'-phosphate
  modified_base 13: mod_base = OTHER; note = 2'-O-methyl-guanosine-3'-phosphate
  modified_base 14: mod_base = OTHER; note = 2'-deoxy-2'-fluoro-uridine-3'-phosphate
  modified_base 15: mod_base = OTHER; note = 2'-O-methyl-adenosine-3'-phosphate
  modified_base 16: mod_base = OTHER; note = 2'-deoxy-2'-fluoro-guanosine-3'-phosphate
  modified_base 17: mod_base = OTHER; note = 2'-O-methyl-uridine-3'-phosphate
  modified_base 18: mod_base = OTHER; note = 2'-O-methyl-uridine-3'-phosphate
  modified_base 19: mod_base = OTHER; note = 2'-O-methyl-adenosine-3'-phosphorothioate
  modified_base 20: mod_base = OTHER; note = 2'-O-methyl-uridine-3'-phosphorothioate
  modified_base 21: mod_base = OTHER; note = 2'-O-methyl-uridine-3'-phosphate
ttaggctattaggtagttatt

SEQ ID NO: 2461 - RNA, 21 nt, synthetic construct
  source 1..21: mol_type = other RNA
  modified_base 1: mod_base = OTHER; note = 2'-O-methyl-uridine-3'-phosphorothioate
  modified_base 2: mod_base = OTHER; note = 2'-deoxy-2'-fluoro-adenosine-3'-phosphorothioate
  modified_base 3: mod_base = OTHER; note = 2'-O-methyl-guanosine-3'-phosphate
  modified_base 4: mod_base = OTHER; note = 2'-O-methyl-uridine-3'-phosphate
  modified_base 5: mod_base = OTHER; note = 2'-O-methyl-adenosine-3'-phosphate
  modified_base 6: mod_base = OTHER; note = 2'-deoxy-2'-fluoro-guanosine-3'-phosphate
  modified_base 7: mod_base = OTHER; note = 2'-O-methyl-guanosine-3'-phosphate
  modified_base 8: mod_base = OTHER; note = 2'-deoxy-2'-fluoro-cytidine-3'-phosphate
  modified_base 9: mod_base = OTHER; note = 2'-deoxy-2'-fluoro-uridine-3'-phosphate
  modified_base 10: mod_base = OTHER; note = 2'-O-methyl-adenosine-3'-phosphate
  modified_base 11: mod_base = OTHER; note = 2'-O-methyl-uridine-3'-phosphate
  modified_base 12: mod_base = OTHER; note = 2'-O-methyl-uridine-3'-phosphate
  modified_base 13: mod_base = OTHER; note = 2'-O-methyl-adenosine-3'-phosphate
  modified_base 14: mod_base = OTHER; note = 2'-deoxy-2'-fluoro-guanosine-3'-phosphate
  modified_base 15: mod_base = OTHER; note = 2'-O-methyl-guanosine-3'-phosphate
  modified_base 16: mod_base = OTHER; note = 2'-deoxy-2'-fluoro-uridine-3'-phosphate
  modified_base 17: mod_base = OTHER; note = 2'-O-methyl-adenosine-3'-phosphate
  modified_base 18: mod_base = OTHER; note = 2'-O-methyl-guanosine-3'-phosphate
  modified_base 19: mod_base = OTHER; note = 2'-O-methyl-uridine-3'-phosphorothioate
  modified_base 20: mod_base = OTHER; note = 2'-O-methyl-uridine-3'-phosphorothioate
  modified_base 21: mod_base = OTHER; note = 2'-O-methyl-uridine-3'-phosphate
tagtaggctattaggtagttt

SEQ ID NO: 2462 - RNA, 21 nt, synthetic construct
  source 1..21: mol_type = other RNA
  modified_base 1: mod_base = OTHER; note = 2'-O-methyl-uridine-3'-phosphorothioate
  modified_base 2: mod_base = OTHER; note = 2'-deoxy-2'-fluoro-guanosine-3'-phosphorothioate
  modified_base 3: mod_base = OTHER; note = 2'-O-methyl-uridine-3'-phosphate
  modified_base 4: mod_base = OTHER; note = 2'-O-methyl-adenosine-3'-phosphate
  modified_base 5: mod_base = OTHER; note = 2'-O-methyl-adenosine-3'-phosphate
  modified_base 6: mod_base = OTHER; note = 2'-deoxy-2'-fluoro-guanosine-3'-phosphate
  modified_base 7: mod_base = OTHER; note = 2'-O-methyl-guanosine-3'-phosphate
  modified_base 8: mod_base = OTHER; note = 2'-deoxy-2'-fluoro-uridine-3'-phosphate
  modified_base 9: mod_base = OTHER; note = 2'-deoxy-2'-fluoro-uridine-3'-phosphate
  modified_base 10: mod_base = OTHER; note = 2'-O-methyl-uridine-3'-phosphate
  modified_base 11: mod_base = OTHER; note = 2'-O-methyl-adenosine-3'-phosphate
  modified_base 12: mod_base = OTHER; note = 2'-O-methyl-uridine-3'-phosphate
  modified_base 13: mod_base = OTHER; note = 2'-O-methyl-guanosine-3'-phosphate
  modified_base 14: mod_base = OTHER; note = 2'-deoxy-2'-fluoro-guanosine-3'-phosphate
  modified_base 15: mod_base = OTHER; note = 2'-O-methyl-uridine-3'-phosphate
  modified_base 16: mod_base = OTHER; note = 2'-deoxy-2'-fluoro-cytidine-3'-phosphate
  modified_base 17: mod_base = OTHER; note = 2'-O-methyl-adenosine-3'-phosphate
  modified_base 18: mod_base = OTHER; note = 2'-O-methyl-adenosine-3'-phosphate
  modified_base 19: mod_base = OTHER; note = 2'-O-methyl-uridine-3'-phosphorothioate
  modified_base 20: mod_base = OTHER; note = 2'-O-methyl-uridine-3'-phosphorothioate
  modified_base 21: mod_base = OTHER; note = 2'-O-methyl-uridine-3'-phosphate
tgtaaggtttatggtcaattt

SEQ ID NO: 2463 - RNA, 21 nt, synthetic construct
  source 1..21: mol_type = other RNA
  modified_base 1: mod_base = OTHER; note = 2'-O-methyl-uridine-3'-phosphorothioate
  modified_base 2: mod_base = OTHER; note = 2'-deoxy-2'-fluoro-adenosine-3'-phosphorothioate
  modified_base 3: mod_base = OTHER; note = 2'-O-methyl-guanosine-3'-phosphate
  modified_base 4: mod_base = OTHER; note = 2'-O-methyl-uridine-3'-phosphate
  modified_base 5: mod_base = OTHER; note = 2'-O-methyl-adenosine-3'-phosphate
  modified_base 6: mod_base = OTHER; note = 2'-deoxy-2'-fluoro-adenosine-3'-phosphate
  modified_base 7: mod_base = OTHER; note = 2'-O-methyl-guanosine-3'-phosphate
  modified_base 8: mod_base = OTHER; note = 2'-deoxy-2'-fluoro-guanosine-3'-phosphate
  modified_base 9: mod_base = OTHER; note = 2'-deoxy-2'-fluoro-uridine-3'-phosphate
  modified_base 10: mod_base = OTHER; note = 2'-O-methyl-uridine-3'-phosphate
  modified_base 11: mod_base = OTHER; note = 2'-O-methyl-uridine-3'-phosphate
  modified_base 12: mod_base = OTHER; note = 2'-O-methyl-adenosine-3'-phosphate
  modified_base 13: mod_base = OTHER; note = 2'-O-methyl-uridine-3'-phosphate
  modified_base 14: mod_base = OTHER; note = 2'-deoxy-2'-fluoro-guanosine-3'-phosphate
  modified_base 15: mod_base = OTHER; note = 2'-O-methyl-guanosine-3'-phosphate
  modified_base 16: mod_base = OTHER; note = 2'-deoxy-2'-fluoro-uridine-3'-phosphate
  modified_base 17: mod_base = OTHER; note = 2'-O-methyl-cytidine-3'-phosphate
  modified_base 18: mod_base = OTHER; note = 2'-O-methyl-adenosine-3'-phosphate
  modified_base 19: mod_base = OTHER; note = 2'-O-methyl-adenosine-3'-phosphorothioate
  modified_base 20: mod_base = OTHER; note = 2'-O-methyl-uridine-3'-phosphorothioate
  modified_base 21: mod_base = OTHER; note = 2'-O-methyl-uridine-3'-phosphate
tagtaaggtttatggtcaatt

SEQ ID NO: 2464 - RNA, 21 nt, synthetic construct
  source 1..21: mol_type = other RNA
  modified_base 1: mod_base = OTHER; note = 2'-O-methyl-uridine-3'-phosphorothioate
  modified_base 2: mod_base = OTHER; note = 2'-deoxy-2'-fluoro-cytidine-3'-phosphorothioate
  modified_base 3: mod_base = OTHER; note = 2'-O-methyl-adenosine-3'-phosphate
  modified_base 4: mod_base = OTHER; note = 2'-O-methyl-guanosine-3'-phosphate
  modified_base 5: mod_base = OTHER; note = 2'-O-methyl-uridine-3'-phosphate
  modified_base 6: mod_base = OTHER; note = 2'-deoxy-2'-fluoro-adenosine-3'-phosphate
  modified_base 7: mod_base = OTHER; note = 2'-O-methyl-adenosine-3'-phosphate
  modified_base 8: mod_base = OTHER; note = 2'-deoxy-2'-fluoro-guanosine-3'-phosphate
  modified_base 9: mod_base = OTHER; note = 2'-deoxy-2'-fluoro-guanosine-3'-phosphate
  modified_base 10: mod_base = OTHER; note = 2'-O-methyl-uridine-3'-phosphate
  modified_base 11: mod_base = OTHER; note = 2'-O-methyl-uridine-3'-phosphate
  modified_base 12: mod_base = OTHER; note = 2'-O-methyl-uridine-3'-phosphate
  modified_base 13: mod_base = OTHER; note = 2'-O-methyl-adenosine-3'-phosphate
  modified_base 14: mod_base = OTHER; note = 2'-deoxy-2'-fluoro-uridine-3'-phosphate
  modified_base 15: mod_base = OTHER; note = 2'-O-methyl-guanosine-3'-phosphate
  modified_base 16: mod_base = OTHER; note = 2'-deoxy-2'-fluoro-guanosine-3'-phosphate
  modified_base 17: mod_base = OTHER; note = 2'-O-methyl-uridine-3'-phosphate
  modified_base 18: mod_base = OTHER; note = 2'-O-methyl-cytidine-3'-phosphate
  modified_base 19: mod_base = OTHER; note = 2'-O-methyl-adenosine-3'-phosphorothioate
  modified_base 20: mod_base = OTHER; note = 2'-O-methyl-uridine-3'-phosphorothioate
  modified_base 21: mod_base = OTHER; note = 2'-O-methyl-uridine-3'-phosphate
tcagtaaggtttatggtcatt

SEQ ID NO: 2465 - RNA, 21 nt, synthetic construct
  source 1..21: mol_type = other RNA
  modified_base 1: mod_base = OTHER; note = 2'-O-methyl-uridine-3'-phosphorothioate
  modified_base 2: mod_base = OTHER; note = 2'-deoxy-2'-fluoro-uridine-3'-phosphorothioate
  modified_base 3: mod_base = OTHER; note = 2'-O-methyl-cytidine-3'-phosphate
  modified_base 4: mod_base = OTHER; note = 2'-O-methyl-adenosine-3'-phosphate
  modified_base 5: mod_base = OTHER; note = 2'-O-methyl-guanosine-3'-phosphate
  modified_base 6: mod_base = OTHER; note = 2'-deoxy-2'-fluoro-uridine-3'-phosphate
  modified_base 7: mod_base = OTHER; note = 2'-O-methyl-adenosine-3'-phosphate
  modified_base 8: mod_base = OTHER; note = 2'-deoxy-2'-fluoro-adenosine-3'-phosphate
  modified_base 9: mod_base = OTHER; note = 2'-deoxy-2'-fluoro-guanosine-3'-phosphate
  modified_base 10: mod_base = OTHER; note = 2'-O-methyl-guanosine-3'-phosphate
  modified_base 11: mod_base = OTHER; note = 2'-O-methyl-uridine-3'-phosphate
  modified_base 12: mod_base = OTHER; note = 2'-O-methyl-uridine-3'-phosphate
  modified_base 13: mod_base = OTHER; note = 2'-O-methyl-uridine-3'-phosphate
  modified_base 14: mod_base = OTHER; note = 2'-deoxy-2'-fluoro-adenosine-3'-phosphate
  modified_base 15: mod_base = OTHER; note = 2'-O-methyl-uridine-3'-phosphate
  modified_base 16: mod_base = OTHER; note = 2'-deoxy-2'-fluoro-guanosine-3'-phosphate
  modified_base 17: mod_base = OTHER; note = 2'-O-methyl-guanosine-3'-phosphate
  modified_base 18: mod_base = OTHER; note = 2'-O-methyl-uridine-3'-phosphate
  modified_base 19: mod_base = OTHER; note = 2'-O-methyl-cytidine-3'-phosphorothioate
  modified_base 20: mod_base = OTHER; note = 2'-O-methyl-uridine-3'-phosphorothioate
  modified_base 21: mod_base = OTHER; note = 2'-O-methyl-uridine-3'-phosphate
ttcagtaaggtttatggtctt

SEQ ID NO: 2466 - RNA, 21 nt, synthetic construct
  source 1..21: mol_type = other RNA
  modified_base 1: mod_base = OTHER; note = 2'-O-methyl-uridine-3'-phosphorothioate
  modified_base 2: mod_base = OTHER; note = 2'-deoxy-2'-fluoro-adenosine-3'-phosphorothioate
  modified_base 3: mod_base = OTHER; note = 2'-O-methyl-uridine-3'-phosphate
  modified_base 4: mod_base = OTHER; note = 2'-O-methyl-cytidine-3'-phosphate
  modified_base 5: mod_base = OTHER; note = 2'-O-methyl-adenosine-3'-phosphate
  modified_base 6: mod_base = OTHER; note = 2'-deoxy-2'-fluoro-guanosine-3'-phosphate
  modified_base 7: mod_base = OTHER; note = 2'-O-methyl-uridine-3'-phosphate
  modified_base 8: mod_base = OTHER; note = 2'-deoxy-2'-fluoro-adenosine-3'-phosphate
  modified_base 9: mod_base = OTHER; note = 2'-deoxy-2'-fluoro-adenosine-3'-phosphate
  modified_base 10: mod_base = OTHER; note = 2'-O-methyl-guanosine-3'-phosphate
  modified_base 11: mod_base = OTHER; note = 2'-O-methyl-guanosine-3'-phosphate
  modified_base 12: mod_base = OTHER; note = 2'-O-methyl-uridine-3'-phosphate
  modified_base 13: mod_base = OTHER; note = 2'-O-methyl-uridine-3'-phosphate
  modified_base 14: mod_base = OTHER; note = 2'-deoxy-2'-fluoro-uridine-3'-phosphate
  modified_base 15: mod_base = OTHER; note = 2'-O-methyl-adenosine-3'-phosphate
  modified_base 16: mod_base = OTHER; note = 2'-deoxy-2'-fluoro-uridine-3'-phosphate
  modified_base 17: mod_base = OTHER; note = 2'-O-methyl-guanosine-3'-phosphate
  modified_base 18: mod_base = OTHER; note = 2'-O-methyl-guanosine-3'-phosphate
  modified_base 19: mod_base = OTHER; note = 2'-O-methyl-uridine-3'-phosphorothioate
  modified_base 20: mod_base = OTHER; note = 2'-O-methyl-uridine-3'-phosphorothioate
  modified_base 21: mod_base = OTHER; note = 2'-O-methyl-uridine-3'-phosphate
tatcagtaaggtttatggttt

SEQ ID NO: 2467 - RNA, 21 nt, synthetic construct
  source 1..21: mol_type = other RNA
  modified_base 1: mod_base = OTHER; note = 2'-O-methyl-uridine-3'-phosphorothioate
  modified_base 2: mod_base = OTHER; note = 2'-deoxy-2'-fluoro-uridine-3'-phosphorothioate
  modified_base 3: mod_base = OTHER; note = 2'-O-methyl-adenosine-3'-phosphate
  modified_base 4: mod_base = OTHER; note = 2'-O-methyl-uridine-3'-phosphate
  modified_base 5: mod_base = OTHER; note = 2'-O-methyl-cytidine-3'-phosphate
  modified_base 6: mod_base = OTHER; note = 2'-deoxy-2'-fluoro-adenosine-3'-phosphate
  modified_base 7: mod_base = OTHER; note = 2'-O-methyl-guanosine-3'-phosphate
  modified_base 8: mod_base = OTHER; note = 2'-deoxy-2'-fluoro-uridine-3'-phosphate
  modified_base 9: mod_base = OTHER; note = 2'-deoxy-2'-fluoro-adenosine-3'-phosphate
  modified_base 10: mod_base = OTHER; note = 2'-O-methyl-adenosine-3'-phosphate
  modified_base 11: mod_base = OTHER; note = 2'-O-methyl-guanosine-3'-phosphate
  modified_base 12: mod_base = OTHER; note = 2'-O-methyl-guanosine-3'-phosphate
  modified_base 13: mod_base = OTHER; note = 2'-O-methyl-uridine-3'-phosphate
  modified_base 14: mod_base = OTHER; note = 2'-deoxy-2'-fluoro-uridine-3'-phosphate
  modified_base 15: mod_base = OTHER; note = 2'-O-methyl-uridine-3'-phosphate
  modified_base 16: mod_base = OTHER; note = 2'-deoxy-2'-fluoro-adenosine-3'-phosphate
  modified_base 17: mod_base = OTHER; note = 2'-O-methyl-uridine-3'-phosphate
  modified_base 18: mod_base = OTHER; note = 2'-O-methyl-guanosine-3'-phosphate
  modified_base 19: mod_base = OTHER; note = 2'-O-methyl-guanosine-3'-phosphorothioate
  modified_base 20: mod_base = OTHER; note = 2'-O-methyl-uridine-3'-phosphorothioate
  modified_base 21: mod_base = OTHER; note = 2'-O-methyl-uridine-3'-phosphate
ttatcagtaaggtttatggtt

SEQ ID NO: 2468 - RNA, 21 nt, synthetic construct
  source 1..21: mol_type = other RNA
  modified_base 1: mod_base = OTHER; note = 2'-O-methyl-uridine-3'-phosphorothioate
  modified_base 2: mod_base = OTHER; note = 2'-deoxy-2'-fluoro-uridine-3'-phosphorothioate
  modified_base 3: mod_base = OTHER; note = 2'-O-methyl-uridine-3'-phosphate
  modified_base 4: mod_base = OTHER; note = 2'-O-methyl-adenosine-3'-phosphate
  modified_base 5: mod_base = OTHER; note = 2'-O-methyl-uridine-3'-phosphate
  modified_base 6: mod_base = OTHER; note = 2'-deoxy-2'-fluoro-cytidine-3'-phosphate
  modified_base 7: mod_base = OTHER; note = 2'-O-methyl-adenosine-3'-phosphate
  modified_base 8: mod_base = OTHER; note = 2'-deoxy-2'-fluoro-guanosine-3'-phosphate
  modified_base 9: mod_base = OTHER; note = 2'-deoxy-2'-fluoro-uridine-3'-phosphate
  modified_base 10: mod_base = OTHER; note = 2'-O-methyl-adenosine-3'-phosphate
  modified_base 11: mod_base = OTHER; note = 2'-O-methyl-adenosine-3'-phosphate
  modified_base 12: mod_base = OTHER; note = 2'-O-methyl-guanosine-3'-phosphate
  modified_base 13: mod_base = OTHER; note = 2'-O-methyl-guanosine-3'-phosphate
  modified_base 14: mod_base = OTHER; note = 2'-deoxy-2'-fluoro-uridine-3'-phosphate
  modified_base 15: mod_base = OTHER; note = 2'-O-methyl-uridine-3'-phosphate
  modified_base 16: mod_base = OTHER; note = 2'-deoxy-2'-fluoro-uridine-3'-phosphate
  modified_base 17: mod_base = OTHER; note = 2'-O-methyl-adenosine-3'-phosphate
  modified_base 18: mod_base = OTHER; note = 2'-O-methyl-uridine-3'-phosphate
  modified_base 19: mod_base = OTHER; note = 2'-O-methyl-guanosine-3'-phosphorothioate
  modified_base 20: mod_base = OTHER; note = 2'-O-methyl-uridine-3'-phosphorothioate
  modified_base 21: mod_base = OTHER; note = 2'-O-methyl-uridine-3'-phosphate
tttatcagtaaggtttatgtt

SEQ ID NO: 2469 - RNA, 21 nt, synthetic construct
  source 1..21: mol_type = other RNA
  modified_base 1: mod_base = OTHER; note = 2'-O-methyl-uridine-3'-phosphorothioate
  modified_base 2: mod_base = OTHER; note = 2'-deoxy-2'-fluoro-guanosine-3'-phosphorothioate
  modified_base 3: mod_base = OTHER; note = 2'-O-methyl-uridine-3'-phosphate
  modified_base 4: mod_base = OTHER; note = 2'-O-methyl-uridine-3'-phosphate
  modified_base 5: mod_base = OTHER; note = 2'-O-methyl-adenosine-3'-phosphate
  modified_base 6: mod_base = OTHER; note = 2'-deoxy-2'-fluoro-uridine-3'-phosphate
  modified_base 7: mod_base = OTHER; note = 2'-O-methyl-cytidine-3'-phosphate
  modified_base 8: mod_base = OTHER; note = 2'-deoxy-2'-fluoro-adenosine-3'-phosphate
  modified_base 9: mod_base = OTHER; note = 2'-deoxy-2'-fluoro-guanosine-3'-phosphate
  modified_base 10: mod_base = OTHER; note = 2'-O-methyl-uridine-3'-phosphate
  modified_base 11: mod_base = OTHER; note = 2'-O-methyl-adenosine-3'-phosphate
  modified_base 12: mod_base = OTHER; note = 2'-O-methyl-adenosine-3'-phosphate
  modified_base 13: mod_base = OTHER; note = 2'-O-methyl-guanosine-3'-phosphate
  modified_base 14: mod_base = OTHER; note = 2'-deoxy-2'-fluoro-guanosine-3'-phosphate
  modified_base 15: mod_base = OTHER; note = 2'-O-methyl-uridine-3'-phosphate
  modified_base 16: mod_base = OTHER; note = 2'-deoxy-2'-fluoro-uridine-3'-phosphate
  modified_base 17: mod_base = OTHER; note = 2'-O-methyl-uridine-3'-phosphate
  modified_base 18: mod_base = OTHER; note = 2'-O-methyl-adenosine-3'-phosphate
  modified_base 19: mod_base = OTHER; note = 2'-O-methyl-uridine-3'-phosphorothioate
  modified_base 20: mod_base = OTHER; note = 2'-O-methyl-uridine-3'-phosphorothioate
  modified_base 21: mod_base = OTHER; note = 2'-O-methyl-uridine-3'-phosphate
tgttatcagtaaggtttattt

SEQ ID NO: 2470 - RNA, 21 nt, synthetic construct
  source 1..21: mol_type = other RNA
  modified_base 1: mod_base = OTHER; note = 2'-O-methyl-uridine-3'-phosphorothioate
  modified_base 2: mod_base = OTHER; note = 2'-deoxy-2'-fluoro-uridine-3'-phosphorothioate
  modified_base 3: mod_base = OTHER; note = 2'-O-methyl-adenosine-3'-phosphate
  modified_base 4: mod_base = OTHER; note = 2'-O-methyl-cytidine-3'-phosphate
  modified_base 5: mod_base = OTHER; note = 2'-O-methyl-uridine-3'-phosphate
  modified_base 6: mod_base = OTHER; note = 2'-deoxy-2'-fluoro-guanosine-3'-phosphate
  modified_base 7: mod_base = OTHER; note = 2'-O-methyl-uridine-3'-phosphate
  modified_base 8: mod_base = OTHER; note = 2'-deoxy-2'-fluoro-uridine-3'-phosphate
  modified_base 9: mod_base = OTHER; note = 2'-deoxy-2'-fluoro-uridine-3'-phosphate
  modified_base 10: mod_base = OTHER; note = 2'-O-methyl-adenosine-3'-phosphate
  modified_base 11: mod_base = OTHER; note = 2'-O-methyl-uridine-3'-phosphate
  modified_base 12: mod_base = OTHER; note = 2'-O-methyl-guanosine-3'-phosphate
  modified_base 13: mod_base = OTHER; note = 2'-O-methyl-uridine-3'-phosphate
  modified_base 14: mod_base = OTHER; note = 2'-deoxy-2'-fluoro-uridine-3'-phosphate
  modified_base 15: mod_base = OTHER; note = 2'-O-methyl-adenosine-3'-phosphate
  modified_base 16: mod_base = OTHER; note = 2'-deoxy-2'-fluoro-uridine-3'-phosphate
  modified_base 17: mod_base = OTHER; note = 2'-O-methyl-cytidine-3'-phosphate
  modified_base 18: mod_base = OTHER; note = 2'-O-methyl-adenosine-3'-phosphate
  modified_base 19: mod_base = OTHER; note = 2'-O-methyl-guanosine-3'-phosphorothioate
  modified_base 20: mod_base = OTHER; note = 2'-O-methyl-uridine-3'-phosphorothioate
  modified_base 21: mod_base = OTHER; note = 2'-O-methyl-uridine-3'-phosphate
ttactgtttatgttatcagtt

SEQ ID NO: 2471 - RNA, 21 nt, synthetic construct
  source 1..21: mol_type = other RNA
  modified_base 1: mod_base = OTHER; note = 2'-O-methyl-uridine-3'-phosphorothioate
  modified_base 2: mod_base = OTHER; note = 2'-deoxy-2'-fluoro-cytidine-3'-phosphorothioate
  modified_base 3: mod_base = OTHER; note = 2'-O-methyl-cytidine-3'-phosphate
  modified_base 4: mod_base = OTHER; note = 2'-O-methyl-cytidine-3'-phosphate
  modified_base 5: mod_base = OTHER; note = 2'-O-methyl-adenosine-3'-phosphate
  modified_base 6: mod_base = OTHER; note = 2'-deoxy-2'-fluoro-cytidine-3'-phosphate
  modified_base 7: mod_base = OTHER; note = 2'-O-methyl-uridine-3'-phosphate
  modified_base 8: mod_base = OTHER; note = 2'-deoxy-2'-fluoro-uridine-3'-phosphate
  modified_base 9: mod_base = OTHER; note = 2'-deoxy-2'-fluoro-cytidine-3'-phosphate
  modified_base 10: mod_base = OTHER; note = 2'-O-methyl-cytidine-3'-phosphate
  modified_base 11: mod_base = OTHER; note = 2'-O-methyl-adenosine-3'-phosphate
  modified_base 12: mod_base = OTHER; note = 2'-O-methyl-uridine-3'-phosphate
  modified_base 13: mod_base = OTHER; note = 2'-O-methyl-uridine-3'-phosphate
  modified_base 14: mod_base = OTHER; note = 2'-deoxy-2'-fluoro-uridine-3'-phosphate
  modified_base 15: mod_base = OTHER; note = 2'-O-methyl-adenosine-3'-phosphate
  modified_base 16: mod_base = OTHER; note = 2'-deoxy-2'-fluoro-adenosine-3'-phosphate
  modified_base 17: mod_base = OTHER; note = 2'-O-methyl-uridine-3'-phosphate
  modified_base 18: mod_base = OTHER; note = 2'-O-methyl-guanosine-3'-phosphate
  modified_base 19: mod_base = OTHER; note = 2'-O-methyl-adenosine-3'-phosphorothioate
  modified_base 20: mod_base = OTHER; note = 2'-O-methyl-uridine-3'-phosphorothioate
  modified_base 21: mod_base = OTHER; note = 2'-O-methyl-uridine-3'-phosphate
tcccacttccatttaatgatt

SEQ ID NO: 2472 - RNA, 21 nt, synthetic construct
  source 1..21: mol_type = other RNA
  modified_base 1: mod_base = OTHER; note = 2'-O-methyl-uridine-3'-phosphorothioate
  modified_base 2: mod_base = OTHER; note = 2'-deoxy-2'-fluoro-adenosine-3'-phosphorothioate
  modified_base 3: mod_base = OTHER; note = 2'-O-methyl-cytidine-3'-phosphate
  modified_base 4: mod_base = OTHER; note = 2'-O-methyl-cytidine-3'-phosphate
  modified_base 5: mod_base = OTHER; note = 2'-O-methyl-cytidine-3'-phosphate
  modified_base 6: mod_base = OTHER; note = 2'-deoxy-2'-fluoro-adenosine-3'-phosphate
  modified_base 7: mod_base = OTHER; note = 2'-O-methyl-cytidine-3'-phosphate
  modified_base 8: mod_base = OTHER; note = 2'-deoxy-2'-fluoro-uridine-3'-phosphate
  modified_base 9: mod_base = OTHER; note = 2'-deoxy-2'-fluoro-uridine-3'-phosphate
  modified_base 10: mod_base = OTHER; note = 2'-O-methyl-cytidine-3'-phosphate
  modified_base 11: mod_base = OTHER; note = 2'-O-methyl-cytidine-3'-phosphate
  modified_base 12: mod_base = OTHER; note = 2'-O-methyl-adenosine-3'-phosphate
  modified_base 13: mod_base = OTHER; note = 2'-O-methyl-uridine-3'-phosphate
  modified_base 14: mod_base = OTHER; note = 2'-deoxy-2'-fluoro-uridine-3'-phosphate
  modified_base 15: mod_base = OTHER; note = 2'-O-methyl-uridine-3'-phosphate
  modified_base 16: mod_base = OTHER; note = 2'-deoxy-2'-fluoro-adenosine-3'-phosphate
  modified_base 17: mod_base = OTHER; note = 2'-O-methyl-adenosine-3'-phosphate
  modified_base 18: mod_base = OTHER; note = 2'-O-methyl-uridine-3'-phosphate
  modified_base 19: mod_base = OTHER; note = 2'-O-methyl-guanosine-3'-phosphorothioate
  modified_base 20: mod_base = OTHER; note = 2'-O-methyl-uridine-3'-phosphorothioate
  modified_base 21: mod_base = OTHER; note = 2'-O-methyl-uridine-3'-phosphate
tacccacttccatttaatgtt

SEQ ID NO: 2473 - RNA, 21 nt, synthetic construct
  source 1..21: mol_type = other RNA
  modified_base 1: mod_base = OTHER; note = 2'-O-methyl-uridine-3'-phosphorothioate
  modified_base 2: mod_base = OTHER; note = 2'-deoxy-2'-fluoro-guanosine-3'-phosphorothioate
  modified_base 3: mod_base = OTHER; note = 2'-O-methyl-adenosine-3'-phosphate
  modified_base 4: mod_base = OTHER; note = 2'-O-methyl-adenosine-3'-phosphate
  modified_base 5: mod_base = OTHER; note = 2'-O-methyl-guanosine-3'-phosphate
  modified_base 6: mod_base = OTHER; note = 2'-deoxy-2'-fluoro-adenosine-3'-phosphate
  modified_base 7: mod_base = OTHER; note = 2'-O-methyl-cytidine-3'-phosphate
  modified_base 8: mod_base = OTHER; note = 2'-deoxy-2'-fluoro-adenosine-3'-phosphate
  modified_base 9: mod_base = OTHER; note = 2'-deoxy-2'-fluoro-adenosine-3'-phosphate
  modified_base 10: mod_base = OTHER; note = 2'-O-methyl-uridine-3'-phosphate
  modified_base 11: mod_base = OTHER; note = 2'-O-methyl-guanosine-3'-phosphate
  modified_base 12: mod_base = OTHER; note = 2'-O-methyl-adenosine-3'-phosphate
  modified_base 13: mod_base = OTHER; note = 2'-O-methyl-guanosine-3'-phosphate
  modified_base 14: mod_base = OTHER; note = 2'-deoxy-2'-fluoro-adenosine-3'-phosphate
  modified_base 15: mod_base = OTHER; note = 2'-O-methyl-adenosine-3'-phosphate
  modified_base 16: mod_base = OTHER; note = 2'-deoxy-2'-fluoro-uridine-3'-phosphate
  modified_base 17: mod_base = OTHER; note = 2'-O-methyl-guanosine-3'-phosphate
  modified_base 18: mod_base = OTHER; note = 2'-O-methyl-adenosine-3'-phosphate
  modified_base 19: mod_base = OTHER; note = 2'-O-methyl-adenosine-3'-phosphorothioate
  modified_base 20: mod_base = OTHER; note = 2'-O-methyl-uridine-3'-phosphorothioate
  modified_base 21: mod_base = OTHER; note = 2'-O-methyl-uridine-3'-phosphate
tgaagacaatgagaatgaatt

SEQ ID NO: 2474 - RNA, 21 nt, synthetic construct
  source 1..21: mol_type = other RNA
  modified_base 1: mod_base = OTHER; note = 2'-O-methyl-uridine-3'-phosphorothioate
  modified_base 2: mod_base = OTHER; note = 2'-deoxy-2'-fluoro-uridine-3'-phosphorothioate
  modified_base 3: mod_base = OTHER; note = 2'-O-methyl-guanosine-3'-phosphate
  modified_base 4: mod_base = OTHER; note = 2'-O-methyl-adenosine-3'-phosphate
  modified_base 5: mod_base = OTHER; note = 2'-O-methyl-adenosine-3'-phosphate
  modified_base 6: mod_base = OTHER; note = 2'-deoxy-2'-fluoro-guanosine-3'-phosphate
  modified_base 7: mod_base = OTHER; note = 2'-O-methyl-adenosine-3'-phosphate
  modified_base 8: mod_base = OTHER; note = 2'-deoxy-2'-fluoro-cytidine-3'-phosphate
  modified_base 9: mod_base = OTHER; note = 2'-deoxy-2'-fluoro-adenosine-3'-phosphate
  modified_base 10: mod_base = OTHER; note = 2'-O-methyl-adenosine-3'-phosphate
  modified_base 11: mod_base = OTHER; note = 2'-O-methyl-uridine-3'-phosphate
  modified_base 12: mod_base = OTHER; note = 2'-O-methyl-guanosine-3'-phosphate
  modified_base 13: mod_base = OTHER; note = 2'-O-methyl-adenosine-3'-phosphate
  modified_base 14: mod_base = OTHER; note = 2'-deoxy-2'-fluoro-guanosine-3'-phosphate
  modified_base 15: mod_base = OTHER; note = 2'-O-methyl-adenosine-3'-phosphate
  modified_base 16: mod_base = OTHER; note = 2'-deoxy-2'-fluoro-adenosine-3'-phosphate
  modified_base 17: mod_base = OTHER; note = 2'-O-methyl-uridine-3'-phosphate
  modified_base 18: mod_base = OTHER; note = 2'-O-methyl-guanosine-3'-phosphate
  modified_base 19: mod_base = OTHER; note = 2'-O-methyl-adenosine-3'-phosphorothioate
  modified_base 20: mod_base = OTHER; note = 2'-O-methyl-uridine-3'-phosphorothioate
  modified_base 21: mod_base = OTHER; note = 2'-O-methyl-uridine-3'-phosphate
ttgaagacaatgagaatgatt

SEQ ID NO: 2475 - RNA, 21 nt, synthetic construct
  source 1..21: mol_type = other RNA
  modified_base 1: mod_base = OTHER; note = 2'-O-methyl-uridine-3'-phosphorothioate
  modified_base 2: mod_base = OTHER; note = 2'-deoxy-2'-fluoro-guanosine-3'-phosphorothioate
  modified_base 3: mod_base = OTHER; note = 2'-O-methyl-uridine-3'-phosphate
  modified_base 4: mod_base = OTHER; note = 2'-O-methyl-guanosine-3'-phosphate
  modified_base 5: mod_base = OTHER; note = 2'-O-methyl-adenosine-3'-phosphate
  modified_base 6: mod_base = OTHER; note = 2'-deoxy-2'-fluoro-adenosine-3'-phosphate
  modified_base 7: mod_base = OTHER; note = 2'-O-methyl-guanosine-3'-phosphate
  modified_base 8: mod_base = OTHER; note = 2'-deoxy-2'-fluoro-adenosine-3'-phosphate
  modified_base 9: mod_base = OTHER; note = 2'-deoxy-2'-fluoro-cytidine-3'-phosphate
  modified_base 10: mod_base = OTHER; note = 2'-O-methyl-adenosine-3'-phosphate
  modified_base 11: mod_base = OTHER; note = 2'-O-methyl-adenosine-3'-phosphate
  modified_base 12: mod_base = OTHER; note = 2'-O-methyl-uridine-3'-phosphate
  modified_base 13: mod_base = OTHER; note = 2'-O-methyl-guanosine-3'-phosphate
  modified_base 14: mod_base = OTHER; note = 2'-deoxy-2'-fluoro-adenosine-3'-phosphate
  modified_base 15: mod_base = OTHER; note = 2'-O-methyl-guanosine-3'-phosphate
  modified_base 16: mod_base = OTHER; note = 2'-deoxy-2'-fluoro-adenosine-3'-phosphate
  modified_base 17: mod_base = OTHER; note = 2'-O-methyl-adenosine-3'-phosphate
  modified_base 18: mod_base = OTHER; note = 2'-O-methyl-uridine-3'-phosphate
  modified_base 19: mod_base = OTHER; note = 2'-O-methyl-guanosine-3'-phosphorothioate
  modified_base 20: mod_base = OTHER; note = 2'-O-methyl-uridine-3'-phosphorothioate
  modified_base 21: mod_base = OTHER; note = 2'-O-methyl-uridine-3'-phosphate
tgtgaagacaatgagaatgtt

SEQ ID NO: 2476 - RNA, 21 nt, synthetic construct
  source 1..21: mol_type = other RNA
  modified_base 1: mod_base = OTHER; note = 2'-O-methyl-uridine-3'-phosphorothioate
  modified_base 2: mod_base = OTHER; note = 2'-deoxy-2'-fluoro-adenosine-3'-phosphorothioate
  modified_base 3: mod_base = OTHER; note = 2'-O-methyl-adenosine-3'-phosphate
  modified_base 4: mod_base = OTHER; note = 2'-O-methyl-uridine-3'-phosphate
  modified_base 5: mod_base = OTHER; note = 2'-O-methyl-guanosine-3'-phosphate
  modified_base 6: mod_base = OTHER; note = 2'-deoxy-2'-fluoro-uridine-3'-phosphate
  modified_base 7: mod_base = OTHER; note = 2'-O-methyl-guanosine-3'-phosphate
  modified_base 8: mod_base = OTHER; note = 2'-deoxy-2'-fluoro-adenosine-3'-phosphate
  modified_base 9: mod_base = OTHER; note = 2'-deoxy-2'-fluoro-adenosine-3'-phosphate
  modified_base 10: mod_base = OTHER; note = 2'-O-methyl-guanosine-3'-phosphate
  modified_base 11: mod_base = OTHER; note = 2'-O-methyl-adenosine-3'-phosphate
  modified_base 12: mod_base = OTHER; note = 2'-O-methyl-cytidine-3'-phosphate
  modified_base 13: mod_base = OTHER; note = 2'-O-methyl-adenosine-3'-phosphate
  modified_base 14: mod_base = OTHER; note = 2'-deoxy-2'-fluoro-adenosine-3'-phosphate
  modified_base 15: mod_base = OTHER; note = 2'-O-methyl-uridine-3'-phosphate
  modified_base 16: mod_base = OTHER; note = 2'-deoxy-2'-fluoro-guanosine-3'-phosphate
  modified_base 17: mod_base = OTHER; note = 2'-O-methyl-adenosine-3'-phosphate
  modified_base 18: mod_base = OTHER; note = 2'-O-methyl-guanosine-3'-phosphate
  modified_base 19: mod_base = OTHER; note = 2'-O-methyl-adenosine-3'-phosphorothioate
  modified_base 20: mod_base = OTHER; note = 2'-O-methyl-uridine-3'-phosphorothioate
  modified_base 21: mod_base = OTHER; note = 2'-O-methyl-uridine-3'-phosphate
taatgtgaagacaatgagatt

SEQ ID NO: 2477 - RNA, 21 nt, synthetic construct
  source 1..21: mol_type = other RNA
  modified_base 1: mod_base = OTHER; note = 2'-O-methyl-uridine-3'-phosphorothioate
  modified_base 2: mod_base = OTHER; note = 2'-deoxy-2'-fluoro-adenosine-3'-phosphorothioate
  modified_base 3: mod_base = OTHER; note = 2'-O-methyl-cytidine-3'-phosphate
  modified_base 4: mod_base = OTHER; note = 2'-O-methyl-adenosine-3'-phosphate
  modified_base 5: mod_base = OTHER; note = 2'-O-methyl-cytidine-3'-phosphate
  modified_base 6: mod_base = OTHER; note = 2'-deoxy-2'-fluoro-cytidine-3'-phosphate
  modified_base 7: mod_base = OTHER; note = 2'-O-methyl-cytidine-3'-phosphate
  modified_base 8: mod_base = OTHER; note = 2'-deoxy-2'-fluoro-cytidine-3'-phosphate
  modified_base 9: mod_base = OTHER; note = 2'-deoxy-2'-fluoro-uridine-3'-phosphate
  modified_base 10: mod_base = OTHER; note = 2'-O-methyl-adenosine-3'-phosphate
  modified_base 11: mod_base = OTHER; note = 2'-O-methyl-adenosine-3'-phosphate
  modified_base 12: mod_base = OTHER; note = 2'-O-methyl-guanosine-3'-phosphate
  modified_base 13: mod_base = OTHER; note = 2'-O-methyl-adenosine-3'-phosphate
  modified_base 14: mod_base = OTHER; note = 2'-deoxy-2'-fluoro-cytidine-3'-phosphate
  modified_base 15: mod_base = OTHER; note = 2'-O-methyl-adenosine-3'-phosphate
  modified_base 16: mod_base = OTHER; note = 2'-deoxy-2'-fluoro-adenosine-3'-phosphate
  modified_base 17: mod_base = OTHER; note = 2'-O-methyl-guanosine-3'-phosphate
  modified_base 18: mod_base = OTHER; note = 2'-O-methyl-adenosine-3'-phosphate
  modified_base 19: mod_base = OTHER; note = 2'-O-methyl-cytidine-3'-phosphorothioate
  modified_base 20: mod_base = OTHER; note = 2'-O-methyl-uridine-3'-phosphorothioate
  modified_base 21: mod_base = OTHER; note = 2'-O-methyl-uridine-3'-phosphate
tacacccctaagacaagactt

SEQ ID NO: 2478 - RNA, 21 nt, synthetic construct
  source 1..21: mol_type = other RNA
  modified_base 1: mod_base = OTHER; note = 2'-O-methyl-uridine-3'-phosphorothioate
  modified_base 2: mod_base = OTHER; note = 2'-deoxy-2'-fluoro-cytidine-3'-phosphorothioate
  modified_base 3: mod_base = OTHER; note = 2'-O-methyl-adenosine-3'-phosphate
  modified_base 4: mod_base = OTHER; note = 2'-O-methyl-cytidine-3'-phosphate
  modified_base 5: mod_base = OTHER; note = 2'-O-methyl-adenosine-3'-phosphate
  modified_base 6: mod_base = OTHER; note = 2'-deoxy-2'-fluoro-cytidine-3'-phosphate
  modified_base 7: mod_base = OTHER; note = 2'-O-methyl-cytidine-3'-phosphate
  modified_base 8: mod_base = OTHER; note = 2'-deoxy-2'-fluoro-cytidine-3'-phosphate
  modified_base 9: mod_base = OTHER; note = 2'-deoxy-2'-fluoro-cytidine-3'-phosphate
  modified_base 10: mod_base = OTHER; note = 2'-O-methyl-uridine-3'-phosphate
  modified_base 11: mod_base = OTHER; note = 2'-O-methyl-adenosine-3'-phosphate
  modified_base 12: mod_base = OTHER; note = 2'-O-methyl-adenosine-3'-phosphate
  modified_base 13: mod_base = OTHER; note = 2'-O-methyl-guanosine-3'-phosphate
  modified_base 14: mod_base = OTHER; note = 2'-deoxy-2'-fluoro-adenosine-3'-phosphate
  modified_base 15: mod_base = OTHER; note = 2'-O-methyl-cytidine-3'-phosphate
  modified_base 16: mod_base = OTHER; note = 2'-deoxy-2'-fluoro-adenosine-3'-phosphate
  modified_base 17: mod_base = OTHER; note = 2'-O-methyl-adenosine-3'-phosphate
  modified_base 18: mod_base = OTHER; note = 2'-O-methyl-guanosine-3'-phosphate
  modified_base 19: mod_base = OTHER; note = 2'-O-methyl-adenosine-3'-phosphorothioate
  modified_base 20: mod_base = OTHER; note = 2'-O-methyl-uridine-3'-phosphorothioate
  modified_base 21: mod_base = OTHER; note = 2'-O-methyl-uridine-3'-phosphate
tcacacccctaagacaagatt

SEQ ID NO: 2479 - RNA, 21 nt, synthetic construct
  source 1..21: mol_type = other RNA
  modified_base 1: mod_base = OTHER; note = 2'-O-methyl-uridine-3'-phosphorothioate
  modified_base 2: mod_base = OTHER; note = 2'-deoxy-2'-fluoro-cytidine-3'-phosphorothioate
  modified_base 3: mod_base = OTHER; note = 2'-O-methyl-cytidine-3'-phosphate
  modified_base 4: mod_base = OTHER; note = 2'-O-methyl-adenosine-3'-phosphate
  modified_base 5: mod_base = OTHER; note = 2'-O-methyl-cytidine-3'-phosphate
  modified_base 6: mod_base = OTHER; note = 2'-deoxy-2'-fluoro-uridine-3'-phosphate
  modified_base 7: mod_base = OTHER; note = 2'-O-methyl-uridine-3'-phosphate
  modified_base 8: mod_base = OTHER; note = 2'-deoxy-2'-fluoro-adenosine-3'-phosphate
  modified_base 9: mod_base = OTHER; note = 2'-deoxy-2'-fluoro-uridine-3'-phosphate
  modified_base 10: mod_base = OTHER; note = 2'-O-methyl-adenosine-3'-phosphate
  modified_base 11: mod_base = OTHER; note = 2'-O-methyl-cytidine-3'-phosphate
  modified_base 12: mod_base = OTHER; note = 2'-O-methyl-adenosine-3'-phosphate
  modified_base 13: mod_base = OTHER; note = 2'-O-methyl-uridine-3'-phosphate
  modified_base 14: mod_base = OTHER; note = 2'-deoxy-2'-fluoro-guanosine-3'-phosphate
  modified_base 15: mod_base = OTHER; note = 2'-O-methyl-adenosine-3'-phosphate
  modified_base 16: mod_base = OTHER; note = 2'-deoxy-2'-fluoro-adenosine-3'-phosphate
  modified_base 17: mod_base = OTHER; note = 2'-O-methyl-uridine-3'-phosphate
  modified_base 18: mod_base = OTHER; note = 2'-O-methyl-adenosine-3'-phosphate
  modified_base 19: mod_base = OTHER; note = 2'-O-methyl-uridine-3'-phosphorothioate
  modified_base 20: mod_base = OTHER; note = 2'-O-methyl-uridine-3'-phosphorothioate
  modified_base 21: mod_base = OTHER; note = 2'-O-methyl-uridine-3'-phosphate
tccacttatacatgaatattt

SEQ ID NO: 2480 - RNA, 21 nt, synthetic construct
  source 1..21: mol_type = other RNA
  modified_base 1: mod_base = OTHER; note = 2'-O-methyl-uridine-3'-phosphorothioate
  modified_base 2: mod_base = OTHER; note = 2'-deoxy-2'-fluoro-adenosine-3'-phosphorothioate
  modified_base 3: mod_base = OTHER; note = 2'-O-methyl-guanosine-3'-phosphate
  modified_base 4: mod_base = OTHER; note = 2'-O-methyl-guanosine-3'-phosphate
  modified_base 5: mod_base = OTHER; note = 2'-O-methyl-guanosine-3'-phosphate
  modified_base 6: mod_base = OTHER; note = 2'-deoxy-2'-fluoro-uridine-3'-phosphate
  modified_base 7: mod_base = OTHER; note = 2'-O-methyl-cytidine-3'-phosphate
  modified_base 8: mod_base = OTHER; note = 2'-deoxy-2'-fluoro-cytidine-3'-phosphate
  modified_base 9: mod_base = OTHER; note = 2'-deoxy-2'-fluoro-adenosine-3'-phosphate
  modified_base 10: mod_base = OTHER; note = 2'-O-methyl-cytidine-3'-phosphate
  modified_base 11: mod_base = OTHER; note = 2'-O-methyl-uridine-3'-phosphate
  modified_base 12: mod_base = OTHER; note = 2'-O-methyl-uridine-3'-phosphate
  modified_base 13: mod_base = OTHER; note = 2'-O-methyl-adenosine-3'-phosphate
  modified_base 14: mod_base = OTHER; note = 2'-deoxy-2'-fluoro-uridine-3'-phosphate
  modified_base 15: mod_base = OTHER; note = 2'-O-methyl-adenosine-3'-phosphate
  modified_base 16: mod_base = OTHER; note = 2'-deoxy-2'-fluoro-cytidine-3'-phosphate
  modified_base 17: mod_base = OTHER; note = 2'-O-methyl-adenosine-3'-phosphate
  modified_base 18: mod_base = OTHER; note = 2'-O-methyl-uridine-3'-phosphate
  modified_base 19: mod_base = OTHER; note = 2'-O-methyl-guanosine-3'-phosphorothioate
  modified_base 20: mod_base = OTHER; note = 2'-O-methyl-uridine-3'-phosphorothioate
  modified_base 21: mod_base = OTHER; note = 2'-O-methyl-uridine-3'-phosphate
tagggtccacttatacatgtt

SEQ ID NO: 2481 - RNA, 21 nt, synthetic construct
  source 1..21: mol_type = other RNA
  modified_base 1: mod_base = OTHER; note = 2'-O-methyl-uridine-3'-phosphorothioate
  modified_base 2: mod_base = OTHER; note = 2'-deoxy-2'-fluoro-adenosine-3'-phosphorothioate
  modified_base 3: mod_base = OTHER; note = 2'-O-methyl-guanosine-3'-phosphate
  modified_base 4: mod_base = OTHER; note = 2'-O-methyl-adenosine-3'-phosphate
  modified_base 5: mod_base = OTHER; note = 2'-O-methyl-guanosine-3'-phosphate
  modified_base 6: mod_base = OTHER; note = 2'-deoxy-2'-fluoro-guanosine-3'-phosphate
  modified_base 7: mod_base = OTHER; note = 2'-O-methyl-adenosine-3'-phosphate
  modified_base 8: mod_base = OTHER; note = 2'-deoxy-2'-fluoro-guanosine-3'-phosphate
  modified_base 9: mod_base = OTHER; note = 2'-deoxy-2'-fluoro-adenosine-3'-phosphate
  modified_base 10: mod_base = OTHER; note = 2'-O-methyl-adenosine-3'-phosphate
  modified_base 11: mod_base = OTHER; note = 2'-O-methyl-adenosine-3'-phosphate
  modified_base 12: mod_base = OTHER; note = 2'-O-methyl-uridine-3'-phosphate
  modified_base 13: mod_base = OTHER; note = 2'-O-methyl-uridine-3'-phosphate
  modified_base 14: mod_base = OTHER; note = 2'-deoxy-2'-fluoro-guanosine-3'-phosphate
  modified_base 15: mod_base = OTHER; note = 2'-O-methyl-adenosine-3'-phosphate
  modified_base 16: mod_base = OTHER; note = 2'-deoxy-2'-fluoro-adenosine-3'-phosphate
  modified_base 17: mod_base = OTHER; note = 2'-O-methyl-adenosine-3'-phosphate
  modified_base 18: mod_base = OTHER; note = 2'-O-methyl-adenosine-3'-phosphate
  modified_base 19: mod_base = OTHER; note = 2'-O-methyl-uridine-3'-phosphorothioate
  modified_base 20: mod_base = OTHER; note = 2'-O-methyl-uridine-3'-phosphorothioate
  modified_base 21: mod_base = OTHER; note = 2'-O-methyl-uridine-3'-phosphate
tagaggagaaattgaaaattt

SEQ ID NO: 2482 - RNA, 21 nt, synthetic construct
  source 1..21: mol_type = other RNA
  modified_base 1: mod_base = OTHER; note = 2'-O-methyl-uridine-3'-phosphorothioate
  modified_base 2: mod_base = OTHER; note = 2'-deoxy-2'-fluoro-cytidine-3'-phosphorothioate
  modified_base 3: mod_base = OTHER; note = 2'-O-methyl-adenosine-3'-phosphate
  modified_base 4: mod_base = OTHER; note = 2'-O-methyl-guanosine-3'-phosphate
  modified_base 5: mod_base = OTHER; note = 2'-O-methyl-adenosine-3'-phosphate
  modified_base 6: mod_base = OTHER; note = 2'-deoxy-2'-fluoro-guanosine-3'-phosphate
  modified_base 7: mod_base = OTHER; note = 2'-O-methyl-guanosine-3'-phosphate
  modified_base 8: mod_base = OTHER; note = 2'-deoxy-2'-fluoro-adenosine-3'-phosphate
  modified_base 9: mod_base = OTHER; note = 2'-deoxy-2'-fluoro-guanosine-3'-phosphate
  modified_base 10: mod_base = OTHER; note = 2'-O-methyl-adenosine-3'-phosphate
  modified_base 11: mod_base = OTHER; note = 2'-O-methyl-adenosine-3'-phosphate
  modified_base 12: mod_base = OTHER; note = 2'-O-methyl-adenosine-3'-phosphate
  modified_base 13: mod_base = OTHER; note = 2'-O-methyl-uridine-3'-phosphate
  modified_base 14: mod_base = OTHER; note = 2'-deoxy-2'-fluoro-uridine-3'-phosphate
  modified_base 15: mod_base = OTHER; note = 2'-O-methyl-guanosine-3'-phosphate
  modified_base 16: mod_base = OTHER; note = 2'-deoxy-2'-fluoro-adenosine-3'-phosphate
  modified_base 17: mod_base = OTHER; note = 2'-O-methyl-adenosine-3'-phosphate
  modified_base 18: mod_base = OTHER; note = 2'-O-methyl-adenosine-3'-phosphate
  modified_base 19: mod_base = OTHER; note = 2'-O-methyl-adenosine-3'-phosphorothioate
  modified_base 20: mod_base = OTHER; note = 2'-O-methyl-uridine-3'-phosphorothioate
  modified_base 21: mod_base = OTHER; note = 2'-O-methyl-uridine-3'-phosphate
tcagaggagaaattgaaaatt

SEQ ID NO: 2483 - RNA, 21 nt, synthetic construct
  source 1..21: mol_type = other RNA
  modified_base 1: mod_base = OTHER; note = 2'-O-methyl-uridine-3'-phosphorothioate
  modified_base 2: mod_base = OTHER; note = 2'-deoxy-2'-fluoro-uridine-3'-phosphorothioate
  modified_base 3: mod_base = OTHER; note = 2'-O-methyl-cytidine-3'-phosphate
  modified_base 4: mod_base = OTHER; note = 2'-O-methyl-adenosine-3'-phosphate
  modified_base 5: mod_base = OTHER; note = 2'-O-methyl-guanosine-3'-phosphate
  modified_base 6: mod_base = OTHER; note = 2'-deoxy-2'-fluoro-adenosine-3'-phosphate
  modified_base 7: mod_base = OTHER; note = 2'-O-methyl-guanosine-3'-phosphate
  modified_base 8: mod_base = OTHER; note = 2'-deoxy-2'-fluoro-guanosine-3'-phosphate
  modified_base 9: mod_base = OTHER; note = 2'-deoxy-2'-fluoro-adenosine-3'-phosphate
  modified_base 10: mod_base = OTHER; note = 2'-O-methyl-guanosine-3'-phosphate
  modified_base 11: mod_base = OTHER; note = 2'-O-methyl-adenosine-3'-phosphate
  modified_base 12: mod_base = OTHER; note = 2'-O-methyl-adenosine-3'-phosphate
  modified_base 13: mod_base = OTHER; note = 2'-O-methyl-adenosine-3'-phosphate
  modified_base 14: mod_base = OTHER; note = 2'-deoxy-2'-fluoro-uridine-3'-phosphate
  modified_base 15: mod_base = OTHER; note = 2'-O-methyl-uridine-3'-phosphate
  modified_base 16: mod_base = OTHER; note = 2'-deoxy-2'-fluoro-guanosine-3'-phosphate
  modified_base 17: mod_base = OTHER; note = 2'-O-methyl-adenosine-3'-phosphate
  modified_base 18: mod_base = OTHER; note = 2'-O-methyl-adenosine-3'-phosphate
  modified_base 19: mod_base = OTHER; note = 2'-O-methyl-adenosine-3'-phosphorothioate
  modified_base 20: mod_base = OTHER; note = 2'-O-methyl-uridine-3'-phosphorothioate
  modified_base 21: mod_base = OTHER; note = 2'-O-methyl-uridine-3'-phosphate
ttcagaggagaaattgaaatt

SEQ ID NO: 2484 - RNA, 21 nt, synthetic construct
  source 1..21: mol_type = other RNA
  modified_base 1: mod_base = OTHER; note = 2'-O-methyl-uridine-3'-phosphorothioate
  modified_base 2: mod_base = OTHER; note = 2'-deoxy-2'-fluoro-adenosine-3'-phosphorothioate
  modified_base 3: mod_base = OTHER; note = 2'-O-methyl-guanosine-3'-phosphate
  modified_base 4: mod_base = OTHER; note = 2'-O-methyl-cytidine-3'-phosphate
  modified_base 5: mod_base = OTHER; note = 2'-O-methyl-cytidine-3'-phosphate
  modified_base 6: mod_base = OTHER; note = 2'-deoxy-2'-fluoro-adenosine-3'-phosphate
  modified_base 7: mod_base = OTHER; note = 2'-O-methyl-adenosine-3'-phosphate
  modified_base 8: mod_base = OTHER; note = 2'-deoxy-2'-fluoro-adenosine-3'-phosphate
  modified_base 9: mod_base = OTHER; note = 2'-deoxy-2'-fluoro-uridine-3'-phosphate
  modified_base 10: mod_base = OTHER; note = 2'-O-methyl-adenosine-3'-phosphate
  modified_base 11: mod_base = OTHER; note = 2'-O-methyl-uridine-3'-phosphate
  modified_base 12: mod_base = OTHER; note = 2'-O-methyl-guanosine-3'-phosphate
  modified_base 13: mod_base = OTHER; note = 2'-O-methyl-adenosine-3'-phosphate
  modified_base 14: mod_base = OTHER; note = 2'-deoxy-2'-fluoro-guanosine-3'-phosphate
  modified_base 15: mod_base = OTHER; note = 2'-O-methyl-adenosine-3'-phosphate
  modified_base 16: mod_base = OTHER; note = 2'-deoxy-2'-fluoro-uridine-3'-phosphate
  modified_base 17: mod_base = OTHER; note = 2'-O-methyl-adenosine-3'-phosphate
  modified_base 18: mod_base = OTHER; note = 2'-O-methyl-adenosine-3'-phosphate
  modified_base 19: mod_base = OTHER; note = 2'-O-methyl-cytidine-3'-phosphorothioate
  modified_base 20: mod_base = OTHER; note = 2'-O-methyl-uridine-3'-phosphorothioate
  modified_base 21: mod_base = OTHER; note = 2'-O-methyl-uridine-3'-phosphate
tagccaaatatgagataactt

SEQ ID NO: 2485 - RNA, 21 nt, synthetic construct
  source 1..21: mol_type = other RNA
  modified_base 1: mod_base = OTHER; note = 2'-O-methyl-uridine-3'-phosphorothioate
  modified_base 2: mod_base = OTHER; note = 2'-deoxy-2'-fluoro-uridine-3'-phosphorothioate
  modified_base 3: mod_base = OTHER; note = 2'-O-methyl-adenosine-3'-phosphate
  modified_base 4: mod_base = OTHER; note = 2'-O-methyl-guanosine-3'-phosphate
  modified_base 5: mod_base = OTHER; note = 2'-O-methyl-cytidine-3'-phosphate
  modified_base 6: mod_base = OTHER; note = 2'-deoxy-2'-fluoro-uridine-3'-phosphate
  modified_base 7: mod_base = OTHER; note = 2'-O-methyl-uridine-3'-phosphate
  modified_base 8: mod_base = OTHER; note = 2'-deoxy-2'-fluoro-uridine-3'-phosphate
  modified_base 9: mod_base = OTHER; note = 2'-deoxy-2'-fluoro-uridine-3'-phosphate
  modified_base 10: mod_base = OTHER; note = 2'-O-methyl-guanosine-3'-phosphate
  modified_base 11: mod_base = OTHER; note = 2'-O-methyl-adenosine-3'-phosphate
  modified_base 12: mod_base = OTHER; note = 2'-O-methyl-cytidine-3'-phosphate
  modified_base 13: mod_base = OTHER; note = 2'-O-methyl-guanosine-3'-phosphate
  modified_base 14: mod_base = OTHER; note = 2'-deoxy-2'-fluoro-uridine-3'-phosphate
  modified_base 15: mod_base = OTHER; note = 2'-O-methyl-guanosine-3'-phosphate
  modified_base 16: mod_base = OTHER; note = 2'-deoxy-2'-fluoro-cytidine-3'-phosphate
  modified_base 17: mod_base = OTHER; note = 2'-O-methyl-uridine-3'-phosphate
  modified_base 18: mod_base = OTHER; note = 2'-O-methyl-uridine-3'-phosphate
  modified_base 19: mod_base = OTHER; note = 2'-O-methyl-guanosine-3'-phosphorothioate
  modified_base 20: mod_base = OTHER; note = 2'-O-methyl-uridine-3'-phosphorothioate
  modified_base 21: mod_base = OTHER; note = 2'-O-methyl-uridine-3'-phosphate
ttagcttttgacgtgcttgtt

SEQ ID NO: 2486 - RNA, 21 nt, synthetic construct
  source 1..21: mol_type = other RNA
  modified_base 1: mod_base = OTHER; note = 2'-O-methyl-uridine-3'-phosphorothioate
  modified_base 2: mod_base = OTHER; note = 2'-deoxy-2'-fluoro-uridine-3'-phosphorothioate
  modified_base 3: mod_base = OTHER; note = 2'-O-methyl-guanosine-3'-phosphate
  modified_base 4: mod_base = OTHER; note = 2'-O-methyl-uridine-3'-phosphate
  modified_base 5: mod_base = OTHER; note = 2'-O-methyl-adenosine-3'-phosphate
  modified_base 6: mod_base = OTHER; note = 2'-deoxy-2'-fluoro-guanosine-3'-phosphate
  modified_base 7: mod_base = OTHER; note = 2'-O-methyl-cytidine-3'-phosphate
  modified_base 8: mod_base = OTHER; note = 2'-deoxy-2'-fluoro-uridine-3'-phosphate
  modified_base 9: mod_base = OTHER; note = 2'-deoxy-2'-fluoro-uridine-3'-phosphate
  modified_base 10: mod_base = OTHER; note = 2'-O-methyl-uridine-3'-phosphate
  modified_base 11: mod_base = OTHER; note = 2'-O-methyl-uridine-3'-phosphate
  modified_base 12: mod_base = OTHER; note = 2'-O-methyl-guanosine-3'-phosphate
  modified_base 13: mod_base = OTHER; note = 2'-O-methyl-adenosine-3'-phosphate
  modified_base 14: mod_base = OTHER; note = 2'-deoxy-2'-fluoro-cytidine-3'-phosphate
  modified_base 15: mod_base = OTHER; note = 2'-O-methyl-guanosine-3'-phosphate
  modified_base 16: mod_base = OTHER; note = 2'-deoxy-2'-fluoro-uridine-3'-phosphate
  modified_base 17: mod_base = OTHER; note = 2'-O-methyl-guanosine-3'-phosphate
  modified_base 18: mod_base = OTHER; note = 2'-O-methyl-cytidine-3'-phosphate
  modified_base 19: mod_base = OTHER; note = 2'-O-methyl-uridine-3'-phosphorothioate
  modified_base 20: mod_base = OTHER; note = 2'-O-methyl-uridine-3'-phosphorothioate
  modified_base 21: mod_base = OTHER; note = 2'-O-methyl-uridine-3'-phosphate
ttgtagcttttgacgtgcttt

SEQ ID NO: 2487 - RNA, 21 nt, synthetic construct
  source 1..21: mol_type = other RNA
  modified_base 1: mod_base = OTHER; note = 2'-O-methyl-uridine-3'-phosphorothioate
  modified_base 2: mod_base = OTHER; note = 2'-deoxy-2'-fluoro-adenosine-3'-phosphorothioate
  modified_base 3: mod_base = OTHER; note = 2'-O-methyl-uridine-3'-phosphate
  modified_base 4: mod_base = OTHER; note = 2'-O-methyl-uridine-3'-phosphate
  modified_base 5: mod_base = OTHER; note = 2'-O-methyl-cytidine-3'-phosphate
  modified_base 6: mod_base = OTHER; note = 2'-deoxy-2'-fluoro-uridine-3'-phosphate
  modified_base 7: mod_base = OTHER; note = 2'-O-methyl-guanosine-3'-phosphate
  modified_base 8: mod_base = OTHER; note = 2'-deoxy-2'-fluoro-uridine-3'-phosphate
  modified_base 9: mod_base = OTHER; note = 2'-deoxy-2'-fluoro-adenosine-3'-phosphate
  modified_base 10: mod_base = OTHER; note = 2'-O-methyl-guanosine-3'-phosphate
  modified_base 11: mod_base = OTHER; note = 2'-O-methyl-cytidine-3'-phosphate
  modified_base 12: mod_base = OTHER; note = 2'-O-methyl-uridine-3'-phosphate
  modified_base 13: mod_base = OTHER; note = 2'-O-methyl-uridine-3'-phosphate
  modified_base 14: mod_base = OTHER; note = 2'-deoxy-2'-fluoro-uridine-3'-phosphate
  modified_base 15: mod_base = OTHER; note = 2'-O-methyl-uridine-3'-phosphate
  modified_base 16: mod_base = OTHER; note = 2'-deoxy-2'-fluoro-guanosine-3'-phosphate
  modified_base 17: mod_base = OTHER; note = 2'-O-methyl-adenosine-3'-phosphate
  modified_base 18: mod_base = OTHER; note = 2'-O-methyl-cytidine-3'-phosphate
  modified_base 19: mod_base = OTHER; note = 2'-O-methyl-guanosine-3'-phosphorothioate
  modified_base 20: mod_base = OTHER; note = 2'-O-methyl-uridine-3'-phosphorothioate
  modified_base 21: mod_base = OTHER; note = 2'-O-methyl-uridine-3'-phosphate
tattctgtagcttttgacgtt

SEQ ID NO: 2488 - RNA, 21 nt, synthetic construct
  source 1..21: mol_type = other RNA
  modified_base 1: mod_base = OTHER; note = 2'-O-methyl-uridine-3'-phosphorothioate
  modified_base 2: mod_base = OTHER; note = 2'-deoxy-2'-fluoro-guanosine-3'-phosphorothioate
  modified_base 3: mod_base = OTHER; note = 2'-O-methyl-adenosine-3'-phosphate
  modified_base 4: mod_base = OTHER; note = 2'-O-methyl-uridine-3'-phosphate
  modified_base 5: mod_base = OTHER; note = 2'-O-methyl-uridine-3'-phosphate
  modified_base 6: mod_base = OTHER; note = 2'-deoxy-2'-fluoro-cytidine-3'-phosphate
  modified_base 7: mod_base = OTHER; note = 2'-O-methyl-uridine-3'-phosphate
  modified_base 8: mod_base = OTHER; note = 2'-deoxy-2'-fluoro-guanosine-3'-phosphate
  modified_base 9: mod_base = OTHER; note = 2'-deoxy-2'-fluoro-uridine-3'-phosphate
  modified_base 10: mod_base = OTHER; note = 2'-O-methyl-adenosine-3'-phosphate
  modified_base 11: mod_base = OTHER; note = 2'-O-methyl-guanosine-3'-phosphate
  modified_base 12: mod_base = OTHER; note = 2'-O-methyl-cytidine-3'-phosphate
  modified_base 13: mod_base = OTHER; note = 2'-O-methyl-uridine-3'-phosphate
  modified_base 14: mod_base = OTHER; note = 2'-deoxy-2'-fluoro-uridine-3'-phosphate
  modified_base 15: mod_base = OTHER; note = 2'-O-methyl-uridine-3'-phosphate
  modified_base 16: mod_base = OTHER; note = 2'-deoxy-2'-fluoro-uridine-3'-phosphate
  modified_base 17: mod_base = OTHER; note = 2'-O-methyl-guanosine-3'-phosphate
  modified_base 18: mod_base = OTHER; note = 2'-O-methyl-adenosine-3'-phosphate
  modified_base 19: mod_base = OTHER; note = 2'-O-methyl-cytidine-3'-phosphorothioate
  modified_base 20: mod_base = OTHER; note = 2'-O-methyl-uridine-3'-phosphorothioate
  modified_base 21: mod_base = OTHER; note = 2'-O-methyl-uridine-3'-phosphate
tgattctgtagcttttgactt

SEQ ID NO: 2489 - RNA, 21 nt, synthetic construct
  source 1..21: mol_type = other RNA
  modified_base 1: mod_base = OTHER; note = 2'-O-methyl-uridine-3'-phosphorothioate
  modified_base 2: mod_base = OTHER; note = 2'-deoxy-2'-fluoro-guanosine-3'-phosphorothioate
  modified_base 3: mod_base = OTHER; note = 2'-O-methyl-cytidine-3'-phosphate
  modified_base 4: mod_base = OTHER; note = 2'-O-methyl-cytidine-3'-phosphate
  modified_base 5: mod_base = OTHER; note = 2'-O-methyl-cytidine-3'-phosphate
  modified_base 6: mod_base = OTHER; note = 2'-deoxy-2'-fluoro-uridine-3'-phosphate
  modified_base 7: mod_base = OTHER; note = 2'-O-methyl-uridine-3'-phosphate
  modified_base 8: mod_base = OTHER; note = 2'-deoxy-2'-fluoro-uridine-3'-phosphate
  modified_base 9: mod_base = OTHER; note = 2'-deoxy-2'-fluoro-uridine-3'-phosphate
  modified_base 10: mod_base = OTHER; note = 2'-O-methyl-cytidine-3'-phosphate
  modified_base 11: mod_base = OTHER; note = 2'-O-methyl-adenosine-3'-phosphate
  modified_base 12: mod_base = OTHER; note = 2'-O-methyl-uridine-3'-phosphate
  modified_base 13: mod_base = OTHER; note = 2'-O-methyl-guanosine-3'-phosphate
  modified_base 14: mod_base = OTHER; note = 2'-deoxy-2'-fluoro-uridine-3'-phosphate
  modified_base 15: mod_base = OTHER; note = 2'-O-methyl-uridine-3'-phosphate
  modified_base 16: mod_base = OTHER; note = 2'-deoxy-2'-fluoro-uridine-3'-phosphate
  modified_base 17: mod_base = OTHER; note = 2'-O-methyl-adenosine-3'-phosphate
  modified_base 18: mod_base = OTHER; note = 2'-O-methyl-cytidine-3'-phosphate
  modified_base 19: mod_base = OTHER; note = 2'-O-methyl-adenosine-3'-phosphorothioate
  modified_base 20: mod_base = OTHER; note = 2'-O-methyl-uridine-3'-phosphorothioate
  modified_base 21: mod_base = OTHER; note = 2'-O-methyl-uridine-3'-phosphate
tgcccttttcatgtttacatt

SEQ ID NO: 2490 - RNA, 21 nt, synthetic construct
  source 1..21: mol_type = other RNA
  modified_base 1: mod_base = OTHER; note = 2'-O-methyl-uridine-3'-phosphorothioate
  modified_base 2: mod_base = OTHER; note = 2'-deoxy-2'-fluoro-adenosine-3'-phosphorothioate
  modified_base 3: mod_base = OTHER; note = 2'-O-methyl-guanosine-3'-phosphate
  modified_base 4: mod_base = OTHER; note = 2'-O-methyl-cytidine-3'-phosphate
  modified_base 5: mod_base = OTHER; note = 2'-O-methyl-cytidine-3'-phosphate
  modified_base 6: mod_base = OTHER; note = 2'-deoxy-2'-fluoro-cytidine-3'-phosphate
  modified_base 7: mod_base = OTHER; note = 2'-O-methyl-uridine-3'-phosphate
  modified_base 8: mod_base = OTHER; note = 2'-deoxy-2'-fluoro-uridine-3'-phosphate
  modified_base 9: mod_base = OTHER; note = 2'-deoxy-2'-fluoro-uridine-3'-phosphate
  modified_base 10: mod_base = OTHER; note = 2'-O-methyl-uridine-3'-phosphate
  modified_base 11: mod_base = OTHER; note = 2'-O-methyl-cytidine-3'-phosphate
  modified_base 12: mod_base = OTHER; note = 2'-O-methyl-adenosine-3'-phosphate
  modified_base 13: mod_base = OTHER; note = 2'-O-methyl-uridine-3'-phosphate
  modified_base 14: mod_base = OTHER; note = 2'-deoxy-2'-fluoro-guanosine-3'-phosphate
  modified_base 15: mod_base = OTHER; note = 2'-O-methyl-uridine-3'-phosphate
  modified_base 16: mod_base = OTHER; note = 2'-deoxy-2'-fluoro-uridine-3'-phosphate
  modified_base 17: mod_base = OTHER; note = 2'-O-methyl-uridine-3'-phosphate
  modified_base 18: mod_base = OTHER; note = 2'-O-methyl-adenosine-3'-phosphate
  modified_base 19: mod_base = OTHER; note = 2'-O-methyl-cytidine-3'-phosphorothioate
  modified_base 20: mod_base = OTHER; note = 2'-O-methyl-uridine-3'-phosphorothioate
  modified_base 21: mod_base = OTHER; note = 2'-O-methyl-uridine-3'-phosphate
tagcccttttcatgtttactt

SEQ ID NO: 2491 - RNA, 21 nt, synthetic construct
  source 1..21: mol_type = other RNA
  modified_base 1: mod_base = OTHER; note = 2'-O-methyl-uridine-3'-phosphorothioate
  modified_base 2: mod_base = OTHER; note = 2'-deoxy-2'-fluoro-cytidine-3'-phosphorothioate
  modified_base 3: mod_base = OTHER; note = 2'-O-methyl-adenosine-3'-phosphate
  modified_base 4: mod_base = OTHER; note = 2'-O-methyl-cytidine-3'-phosphate
  modified_base 5: mod_base = OTHER; note = 2'-O-methyl-cytidine-3'-phosphate
  modified_base 6: mod_base = OTHER; note = 2'-deoxy-2'-fluoro-adenosine-3'-phosphate
  modified_base 7: mod_base = OTHER; note = 2'-O-methyl-guanosine-3'-phosphate
  modified_base 8: mod_base = OTHER; note = 2'-deoxy-2'-fluoro-uridine-3'-phosphate
  modified_base 9: mod_base = OTHER; note = 2'-deoxy-2'-fluoro-uridine-3'-phosphate
  modified_base 10: mod_base = OTHER; note = 2'-O-methyl-cytidine-3'-phosphate
  modified_base 11: mod_base = OTHER; note = 2'-O-methyl-uridine-3'-phosphate
  modified_base 12: mod_base = OTHER; note = 2'-O-methyl-cytidine-3'-phosphate
  modified_base 13: mod_base = OTHER; note = 2'-O-methyl-adenosine-3'-phosphate
  modified_base 14: mod_base = OTHER; note = 2'-deoxy-2'-fluoro-uridine-3'-phosphate
  modified_base 15: mod_base = OTHER; note = 2'-O-methyl-cytidine-3'-phosphate
  modified_base 16: mod_base = OTHER; note = 2'-deoxy-2'-fluoro-uridine-3'-phosphate
  modified_base 17: mod_base = OTHER; note = 2'-O-methyl-guanosine-3'-phosphate
  modified_base 18: mod_base = OTHER; note = 2'-O-methyl-uridine-3'-phosphate
  modified_base 19: mod_base = OTHER; note = 2'-O-methyl-uridine-3'-phosphorothioate
  modified_base 20: mod_base = OTHER; note = 2'-O-methyl-uridine-3'-phosphorothioate
  modified_base 21: mod_base = OTHER; note = 2'-O-methyl-uridine-3'-phosphate
tcaccagttctcatctgtttt

SEQ ID NO: 2492 - RNA, 21 nt, synthetic construct
  source 1..21: mol_type = other RNA
  modified_base 1: mod_base = OTHER; note = 2'-O-methyl-uridine-3'-phosphorothioate
  modified_base 2: mod_base = OTHER; note = 2'-deoxy-2'-fluoro-cytidine-3'-phosphorothioate
  modified_base 3: mod_base = OTHER; note = 2'-O-methyl-cytidine-3'-phosphate
  modified_base 4: mod_base = OTHER; note = 2'-O-methyl-adenosine-3'-phosphate
  modified_base 5: mod_base = OTHER; note = 2'-O-methyl-cytidine-3'-phosphate
  modified_base 6: mod_base = OTHER; note = 2'-deoxy-2'-fluoro-cytidine-3'-phosphate
  modified_base 7: mod_base = OTHER; note = 2'-O-methyl-adenosine-3'-phosphate
  modified_base 8: mod_base = OTHER; note = 2'-deoxy-2'-fluoro-guanosine-3'-phosphate
  modified_base 9: mod_base = OTHER; note = 2'-deoxy-2'-fluoro-uridine-3'-phosphate
  modified_base 10: mod_base = OTHER; note = 2'-O-methyl-uridine-3'-phosphate
  modified_base 11: mod_base = OTHER; note = 2'-O-methyl-cytidine-3'-phosphate
  modified_base 12: mod_base = OTHER; note = 2'-O-methyl-uridine-3'-phosphate
  modified_base 13: mod_base = OTHER; note = 2'-O-methyl-cytidine-3'-phosphate
  modified_base 14: mod_base = OTHER; note = 2'-deoxy-2'-fluoro-adenosine-3'-phosphate
  modified_base 15: mod_base = OTHER; note = 2'-O-methyl-uridine-3'-phosphate
  modified_base 16: mod_base = OTHER; note = 2'-deoxy-2'-fluoro-cytidine-3'-phosphate
  modified_base 17: mod_base = OTHER; note = 2'-O-methyl-uridine-3'-phosphate
  modified_base 18: mod_base = OTHER; note = 2'-O-methyl-guanosine-3'-phosphate
  modified_base 19: mod_base = OTHER; note = 2'-O-methyl-uridine-3'-phosphorothioate
  modified_base 20: mod_base = OTHER; note = 2'-O-methyl-uridine-3'-phosphorothioate
  modified_base 21: mod_base = OTHER; note = 2'-O-methyl-uridine-3'-phosphate
tccaccagttctcatctgttt

SEQ ID NO: 2493 - RNA, 21 nt, synthetic construct
  source 1..21: mol_type = other RNA
  modified_base 1: mod_base = OTHER; note = 2'-O-methyl-uridine-3'-phosphorothioate
  modified_base 2: mod_base = OTHER; note = 2'-deoxy-2'-fluoro-adenosine-3'-phosphorothioate
  modified_base 3: mod_base = OTHER; note = 2'-O-methyl-cytidine-3'-phosphate
  modified_base 4: mod_base = OTHER; note = 2'-O-methyl-cytidine-3'-phosphate
  modified_base 5: mod_base = OTHER; note = 2'-O-methyl-adenosine-3'-phosphate
  modified_base 6: mod_base = OTHER; note = 2'-deoxy-2'-fluoro-cytidine-3'-phosphate
  modified_base 7: mod_base = OTHER; note = 2'-O-methyl-cytidine-3'-phosphate
  modified_base 8: mod_base = OTHER; note = 2'-deoxy-2'-fluoro-adenosine-3'-phosphate
  modified_base 9: mod_base = OTHER; note = 2'-deoxy-2'-fluoro-guanosine-3'-phosphate
  modified_base 10: mod_base = OTHER; note = 2'-O-methyl-uridine-3'-phosphate
  modified_base 11: mod_base = OTHER; note = 2'-O-methyl-uridine-3'-phosphate
  modified_base 12: mod_base = OTHER; note = 2'-O-methyl-cytidine-3'-phosphate
  modified_base 13: mod_base = OTHER; note = 2'-O-methyl-uridine-3'-phosphate
  modified_base 14: mod_base = OTHER; note = 2'-deoxy-2'-fluoro-cytidine-3'-phosphate
  modified_base 15: mod_base = OTHER; note = 2'-O-methyl-adenosine-3'-phosphate
  modified_base 16: mod_base = OTHER; note = 2'-deoxy-2'-fluoro-uridine-3'-phosphate
  modified_base 17: mod_base = OTHER; note = 2'-O-methyl-cytidine-3'-phosphate
  modified_base 18: mod_base = OTHER; note = 2'-O-methyl-uridine-3'-phosphate
  modified_base 19: mod_base = OTHER; note = 2'-O-methyl-guanosine-3'-phosphorothioate
  modified_base 20: mod_base = OTHER; note = 2'-O-methyl-uridine-3'-phosphorothioate
  modified_base 21: mod_base = OTHER; note = 2'-O-methyl-uridine-3'-phosphate
taccaccagttctcatctgtt

SEQ ID NO: 2494 - RNA, 21 nt, synthetic construct
  source 1..21: mol_type = other RNA
  modified_base 1: mod_base = OTHER; note = 2'-O-methyl-uridine-3'-phosphorothioate
  modified_base 2: mod_base = OTHER; note = 2'-deoxy-2'-fluoro-adenosine-3'-phosphorothioate
  modified_base 3: mod_base = OTHER; note = 2'-O-methyl-adenosine-3'-phosphate
  modified_base 4: mod_base = OTHER; note = 2'-O-methyl-cytidine-3'-phosphate
  modified_base 5: mod_base = OTHER; note = 2'-O-methyl-cytidine-3'-phosphate
  modified_base 6: mod_base = OTHER; note = 2'-deoxy-2'-fluoro-adenosine-3'-phosphate
  modified_base 7: mod_base = OTHER; note = 2'-O-methyl-cytidine-3'-phosphate
  modified_base 8: mod_base = OTHER; note = 2'-deoxy-2'-fluoro-cytidine-3'-phosphate
  modified_base 9: mod_base = OTHER; note = 2'-deoxy-2'-fluoro-adenosine-3'-phosphate
  modified_base 10: mod_base = OTHER; note = 2'-O-methyl-guanosine-3'-phosphate
  modified_base 11: mod_base = OTHER; note = 2'-O-methyl-uridine-3'-phosphate
  modified_base 12: mod_base = OTHER; note = 2'-O-methyl-uridine-3'-phosphate
  modified_base 13: mod_base = OTHER; note = 2'-O-methyl-cytidine-3'-phosphate
  modified_base 14: mod_base = OTHER; note = 2'-deoxy-2'-fluoro-uridine-3'-phosphate
  modified_base 15: mod_base = OTHER; note = 2'-O-methyl-cytidine-3'-phosphate
  modified_base 16: mod_base = OTHER; note = 2'-deoxy-2'-fluoro-adenosine-3'-phosphate
  modified_base 17: mod_base = OTHER; note = 2'-O-methyl-uridine-3'-phosphate
  modified_base 18: mod_base = OTHER; note = 2'-O-methyl-cytidine-3'-phosphate
  modified_base 19: mod_base = OTHER; note = 2'-O-methyl-uridine-3'-phosphorothioate
  modified_base 20: mod_base = OTHER; note = 2'-O-methyl-uridine-3'-phosphorothioate
  modified_base 21: mod_base = OTHER; note = 2'-O-methyl-uridine-3'-phosphate
taaccaccagttctcatcttt

SEQ ID NO: 2495 - RNA, 21 nt, synthetic construct
  source 1..21: mol_type = other RNA
  modified_base 1: mod_base = OTHER; note = 2'-O-methyl-uridine-3'-phosphorothioate
  modified_base 2: mod_base = OTHER; note = 2'-deoxy-2'-fluoro-uridine-3'-phosphorothioate
  modified_base 3: mod_base = OTHER; note = 2'-O-methyl-adenosine-3'-phosphate
  modified_base 4: mod_base = OTHER; note = 2'-O-methyl-adenosine-3'-phosphate
  modified_base 5: mod_base = OTHER; note = 2'-O-methyl-cytidine-3'-phosphate
  modified_base 6: mod_base = OTHER; note = 2'-deoxy-2'-fluoro-cytidine-3'-phosphate
  modified_base 7: mod_base = OTHER; note = 2'-O-methyl-adenosine-3'-phosphate
  modified_base 8: mod_base = OTHER; note = 2'-deoxy-2'-fluoro-cytidine-3'-phosphate
  modified_base 9: mod_base = OTHER; note = 2'-deoxy-2'-fluoro-cytidine-3'-phosphate
  modified_base 10: mod_base = OTHER; note = 2'-O-methyl-adenosine-3'-phosphate
  modified_base 11: mod_base = OTHER; note = 2'-O-methyl-guanosine-3'-phosphate
  modified_base 12: mod_base = OTHER; note = 2'-O-methyl-uridine-3'-phosphate
  modified_base 13: mod_base = OTHER; note = 2'-O-methyl-uridine-3'-phosphate
  modified_base 14: mod_base = OTHER; note = 2'-deoxy-2'-fluoro-cytidine-3'-phosphate
  modified_base 15: mod_base = OTHER; note = 2'-O-methyl-uridine-3'-phosphate
  modified_base 16: mod_base = OTHER; note = 2'-deoxy-2'-fluoro-cytidine-3'-phosphate
  modified_base 17: mod_base = OTHER; note = 2'-O-methyl-adenosine-3'-phosphate
  modified_base 18: mod_base = OTHER; note = 2'-O-methyl-uridine-3'-phosphate
  modified_base 19: mod_base = OTHER; note = 2'-O-methyl-cytidine-3'-phosphorothioate
  modified_base 20: mod_base = OTHER; note = 2'-O-methyl-uridine-3'-phosphorothioate
  modified_base 21: mod_base = OTHER; note = 2'-O-methyl-uridine-3'-phosphate
ttaaccaccagttctcatctt

SEQ ID NO: 2496 - RNA, 21 nt, synthetic construct
  source 1..21: mol_type = other RNA
  modified_base 1: mod_base = OTHER; note = 2'-O-methyl-uridine-3'-phosphorothioate
  modified_base 2: mod_base = OTHER; note = 2'-deoxy-2'-fluoro-uridine-3'-phosphorothioate
  modified_base 3: mod_base = OTHER; note = 2'-O-methyl-uridine-3'-phosphate
  modified_base 4: mod_base = OTHER; note = 2'-O-methyl-adenosine-3'-phosphate
  modified_base 5: mod_base = OTHER; note = 2'-O-methyl-adenosine-3'-phosphate
  modified_base 6: mod_base = OTHER; note = 2'-deoxy-2'-fluoro-cytidine-3'-phosphate
  modified_base 7: mod_base = OTHER; note = 2'-O-methyl-cytidine-3'-phosphate
  modified_base 8: mod_base = OTHER; note = 2'-deoxy-2'-fluoro-adenosine-3'-phosphate
  modified_base 9: mod_base = OTHER; note = 2'-deoxy-2'-fluoro-cytidine-3'-phosphate
  modified_base 10: mod_base = OTHER; note = 2'-O-methyl-cytidine-3'-phosphate
  modified_base 11: mod_base = OTHER; note = 2'-O-methyl-adenosine-3'-phosphate
  modified_base 12: mod_base = OTHER; note = 2'-O-methyl-guanosine-3'-phosphate
  modified_base 13: mod_base = OTHER; note = 2'-O-methyl-uridine-3'-phosphate
  modified_base 14: mod_base = OTHER; note = 2'-deoxy-2'-fluoro-uridine-3'-phosphate
  modified_base 15: mod_base = OTHER; note = 2'-O-methyl-cytidine-3'-phosphate
  modified_base 16: mod_base = OTHER; note = 2'-deoxy-2'-fluoro-uridine-3'-phosphate
  modified_base 17: mod_base = OTHER; note = 2'-O-methyl-cytidine-3'-phosphate
  modified_base 18: mod_base = OTHER; note = 2'-O-methyl-adenosine-3'-phosphate
  modified_base 19: mod_base = OTHER; note = 2'-O-methyl-uridine-3'-phosphorothioate
  modified_base 20: mod_base = OTHER; note = 2'-O-methyl-uridine-3'-phosphorothioate
  modified_base 21: mod_base = OTHER; note = 2'-O-methyl-uridine-3'-phosphate
tttaaccaccagttctcattt

SEQ ID NO: 2497 - RNA, 21 nt, synthetic construct
  source 1..21: mol_type = other RNA
  modified_base 1: mod_base = OTHER; note = 2'-O-methyl-uridine-3'-phosphorothioate
  modified_base 2: mod_base = OTHER; note = 2'-deoxy-2'-fluoro-adenosine-3'-phosphorothioate
  modified_base 3: mod_base = OTHER; note = 2'-O-methyl-uridine-3'-phosphate
  modified_base 4: mod_base = OTHER; note = 2'-O-methyl-uridine-3'-phosphate
  modified_base 5: mod_base = OTHER; note = 2'-O-methyl-adenosine-3'-phosphate
  modified_base 6: mod_base = OTHER; note = 2'-deoxy-2'-fluoro-adenosine-3'-phosphate
  modified_base 7: mod_base = OTHER; note = 2'-O-methyl-cytidine-3'-phosphate
  modified_base 8: mod_base = OTHER; note = 2'-deoxy-2'-fluoro-cytidine-3'-phosphate
  modified_base 9: mod_base = OTHER; note = 2'-deoxy-2'-fluoro-adenosine-3'-phosphate
  modified_base 10: mod_base = OTHER; note = 2'-O-methyl-cytidine-3'-phosphate
  modified_base 11: mod_base = OTHER; note = 2'-O-methyl-cytidine-3'-phosphate
  modified_base 12: mod_base = OTHER; note = 2'-O-methyl-adenosine-3'-phosphate
  modified_base 13: mod_base = OTHER; note = 2'-O-methyl-guanosine-3'-phosphate
  modified_base 14: mod_base = OTHER; note = 2'-deoxy-2'-fluoro-uridine-3'-phosphate
  modified_base 15: mod_base = OTHER; note = 2'-O-methyl-uridine-3'-phosphate
  modified_base 16: mod_base = OTHER; note = 2'-deoxy-2'-fluoro-cytidine-3'-phosphate
  modified_base 17: mod_base = OTHER; note = 2'-O-methyl-uridine-3'-phosphate
  modified_base 18: mod_base = OTHER; note = 2'-O-methyl-cytidine-3'-phosphate
  modified_base 19: mod_base = OTHER; note = 2'-O-methyl-adenosine-3'-phosphorothioate
  modified_base 20: mod_base = OTHER; note = 2'-O-methyl-uridine-3'-phosphorothioate
  modified_base 21: mod_base = OTHER; note = 2'-O-methyl-uridine-3'-phosphate
tattaaccaccagttctcatt

SEQ ID NO: 2498 - RNA, 21 nt, synthetic construct
  source 1..21: mol_type = other RNA
  modified_base 1: mod_base = OTHER; note = 2'-O-methyl-uridine-3'-phosphorothioate
  modified_base 2: mod_base = OTHER; note = 2'-deoxy-2'-fluoro-uridine-3'-phosphorothioate
  modified_base 3: mod_base = OTHER; note = 2'-O-methyl-adenosine-3'-phosphate
  modified_base 4: mod_base = OTHER; note = 2'-O-methyl-uridine-3'-phosphate
  modified_base 5: mod_base = OTHER; note = 2'-O-methyl-uridine-3'-phosphate
  modified_base 6: mod_base = OTHER; note = 2'-deoxy-2'-fluoro-adenosine-3'-phosphate
  modified_base 7: mod_base = OTHER; note = 2'-O-methyl-adenosine-3'-phosphate
  modified_base 8: mod_base = OTHER; note = 2'-deoxy-2'-fluoro-cytidine-3'-phosphate
  modified_base 9: mod_base = OTHER; note = 2'-deoxy-2'-fluoro-cytidine-3'-phosphate
  modified_base 10: mod_base = OTHER; note = 2'-O-methyl-adenosine-3'-phosphate
  modified_base 11: mod_base = OTHER; note = 2'-O-methyl-cytidine-3'-phosphate
  modified_base 12: mod_base = OTHER; note = 2'-O-methyl-cytidine-3'-phosphate
  modified_base 13: mod_base = OTHER; note = 2'-O-methyl-adenosine-3'-phosphate
  modified_base 14: mod_base = OTHER; note = 2'-deoxy-2'-fluoro-guanosine-3'-phosphate
  modified_base 15: mod_base = OTHER; note = 2'-O-methyl-uridine-3'-phosphate
  modified_base 16: mod_base = OTHER; note = 2'-deoxy-2'-fluoro-uridine-3'-phosphate
  modified_base 17: mod_base = OTHER; note = 2'-O-methyl-cytidine-3'-phosphate
  modified_base 18: mod_base = OTHER; note = 2'-O-methyl-uridine-3'-phosphate
  modified_base 19: mod_base = OTHER; note = 2'-O-methyl-cytidine-3'-phosphorothioate
  modified_base 20: mod_base = OTHER; note = 2'-O-methyl-uridine-3'-phosphorothioate
  modified_base 21: mod_base = OTHER; note = 2'-O-methyl-uridine-3'-phosphate
ttattaaccaccagttctctt

SEQ ID NO: 2499 - RNA, 21 nt, synthetic construct
  source 1..21: mol_type = other RNA
  modified_base 1: mod_base = OTHER; note = 2'-O-methyl-uridine-3'-phosphorothioate
  modified_base 2: mod_base = OTHER; note = 2'-deoxy-2'-fluoro-adenosine-3'-phosphorothioate
  modified_base 3: mod_base = OTHER; note = 2'-O-methyl-uridine-3'-phosphate
  modified_base 4: mod_base = OTHER; note = 2'-O-methyl-adenosine-3'-phosphate
  modified_base 5: mod_base = OTHER; note = 2'-O-methyl-uridine-3'-phosphate
  modified_base 6: mod_base = OTHER; note = 2'-deoxy-2'-fluoro-uridine-3'-phosphate
  modified_base 7: mod_base = OTHER; note = 2'-O-methyl-adenosine-3'-phosphate
  modified_base 8: mod_base = OTHER; note = 2'-deoxy-2'-fluoro-adenosine-3'-phosphate
  modified_base 9: mod_base = OTHER; note = 2'-deoxy-2'-fluoro-cytidine-3'-phosphate
  modified_base 10: mod_base = OTHER; note = 2'-O-methyl-cytidine-3'-phosphate
  modified_base 11: mod_base = OTHER; note = 2'-O-methyl-adenosine-3'-phosphate
  modified_base 12: mod_base = OTHER; note = 2'-O-methyl-cytidine-3'-phosphate
  modified_base 13: mod_base = OTHER; note = 2'-O-methyl-cytidine-3'-phosphate
  modified_base 14: mod_base = OTHER; note = 2'-deoxy-2'-fluoro-adenosine-3'-phosphate
  modified_base 15: mod_base = OTHER; note = 2'-O-methyl-guanosine-3'-phosphate
  modified_base 16: mod_base = OTHER; note = 2'-deoxy-2'-fluoro-uridine-3'-phosphate
  modified_base 17: mod_base = OTHER; note = 2'-O-methyl-uridine-3'-phosphate
  modified_base 18: mod_base = OTHER; note = 2'-O-methyl-cytidine-3'-phosphate
  modified_base 19: mod_base = OTHER; note = 2'-O-methyl-uridine-3'-phosphorothioate
  modified_base 20: mod_base = OTHER; note = 2'-O-methyl-uridine-3'-phosphorothioate
  modified_base 21: mod_base = OTHER; note = 2'-O-methyl-uridine-3'-phosphate
tatattaaccaccagttcttt

SEQ ID NO: 2500 - RNA, 21 nt, synthetic construct
  source 1..21: mol_type = other RNA
  modified_base 1: mod_base = OTHER; note = 2'-O-methyl-uridine-3'-phosphorothioate
  modified_base 2: mod_base = OTHER; note = 2'-deoxy-2'-fluoro-adenosine-3'-phosphorothioate
  modified_base 3: mod_base = OTHER; note = 2'-O-methyl-guanosine-3'-phosphate
  modified_base 4: mod_base = OTHER; note = 2'-O-methyl-guanosine-3'-phosphate
  modified_base 5: mod_base = OTHER; note = 2'-O-methyl-uridine-3'-phosphate
  modified_base 6: mod_base = OTHER; note = 2'-deoxy-2'-fluoro-uridine-3'-phosphate
  modified_base 7: mod_base = OTHER; note = 2'-O-methyl-uridine-3'-phosphate
  modified_base 8: mod_base = OTHER; note = 2'-deoxy-2'-fluoro-cytidine-3'-phosphate
  modified_base 9: mod_base = OTHER; note = 2'-deoxy-2'-fluoro-adenosine-3'-phosphate
  modified_base 10: mod_base = OTHER; note = 2'-O-methyl-uridine-3'-phosphate
  modified_base 11: mod_base = OTHER; note = 2'-O-methyl-guanosine-3'-phosphate
  modified_base 12: mod_base = OTHER; note = 2'-O-methyl-adenosine-3'-phosphate
  modified_base 13: mod_base = OTHER; note = 2'-O-methyl-uridine-3'-phosphate
  modified_base 14: mod_base = OTHER; note = 2'-deoxy-2'-fluoro-uridine-3'-phosphate
  modified_base 15: mod_base = OTHER; note = 2'-O-methyl-cytidine-3'-phosphate
  modified_base 16: mod_base = OTHER; note = 2'-deoxy-2'-fluoro-cytidine-3'-phosphate
  modified_base 17: mod_base = OTHER; note = 2'-O-methyl-adenosine-3'-phosphate
  modified_base 18: mod_base = OTHER; note = 2'-O-methyl-adenosine-3'-phosphate
  modified_base 19: mod_base = OTHER; note = 2'-O-methyl-adenosine-3'-phosphorothioate
  modified_base 20: mod_base = OTHER; note = 2'-O-methyl-uridine-3'-phosphorothioate
  modified_base 21: mod_base = OTHER; note = 2'-O-methyl-uridine-3'-phosphate
taggtttcatgattccaaatt

SEQ ID NO: 2501 - RNA, 21 nt, synthetic construct
  source 1..21: mol_type = other RNA
  modified_base 1: mod_base = OTHER; note = 2'-O-methyl-uridine-3'-phosphorothioate
  modified_base 2: mod_base = OTHER; note = 2'-deoxy-2'-fluoro-adenosine-3'-phosphorothioate
  modified_base 3: mod_base = OTHER; note = 2'-O-methyl-adenosine-3'-phosphate
  modified_base 4: mod_base = OTHER; note = 2'-O-methyl-guanosine-3'-phosphate
  modified_base 5: mod_base = OTHER; note = 2'-O-methyl-guanosine-3'-phosphate
  modified_base 6: mod_base = OTHER; note = 2'-deoxy-2'-fluoro-uridine-3'-phosphate
  modified_base 7: mod_base = OTHER; note = 2'-O-methyl-uridine-3'-phosphate
  modified_base 8: mod_base = OTHER; note = 2'-deoxy-2'-fluoro-uridine-3'-phosphate
  modified_base 9: mod_base = OTHER; note = 2'-deoxy-2'-fluoro-cytidine-3'-phosphate
  modified_base 10: mod_base = OTHER; note = 2'-O-methyl-adenosine-3'-phosphate
  modified_base 11: mod_base = OTHER; note = 2'-O-methyl-uridine-3'-phosphate
  modified_base 12: mod_base = OTHER; note = 2'-O-methyl-guanosine-3'-phosphate
  modified_base 13: mod_base = OTHER; note = 2'-O-methyl-adenosine-3'-phosphate
  modified_base 14: mod_base = OTHER; note = 2'-deoxy-2'-fluoro-uridine-3'-phosphate
  modified_base 15: mod_base = OTHER; note = 2'-O-methyl-uridine-3'-phosphate
  modified_base 16: mod_base = OTHER; note = 2'-deoxy-2'-fluoro-cytidine-3'-phosphate
  modified_base 17: mod_base = OTHER; note = 2'-O-methyl-cytidine-3'-phosphate
  modified_base 18: mod_base = OTHER; note = 2'-O-methyl-adenosine-3'-phosphate
  modified_base 19: mod_base = OTHER; note = 2'-O-methyl-adenosine-3'-phosphorothioate
  modified_base 20: mod_base = OTHER; note = 2'-O-methyl-uridine-3'-phosphorothioate
  modified_base 21: mod_base = OTHER; note = 2'-O-methyl-uridine-3'-phosphate
taaggtttcatgattccaatt

SEQ ID NO: 2502 - RNA, 21 nt, synthetic construct
  source 1..21: mol_type = other RNA
  modified_base 1: mod_base = OTHER; note = 2'-O-methyl-uridine-3'-phosphorothioate
  modified_base 2: mod_base = OTHER; note = 2'-deoxy-2'-fluoro-adenosine-3'-phosphorothioate
  modified_base 3: mod_base = OTHER; note = 2'-O-methyl-uridine-3'-phosphate
  modified_base 4: mod_base = OTHER; note = 2'-O-methyl-uridine-3'-phosphate
  modified_base 5: mod_base = OTHER; note = 2'-O-methyl-uridine-3'-phosphate
  modified_base 6: mod_base = OTHER; note = 2'-deoxy-2'-fluoro-uridine-3'-phosphate
  modified_base 7: mod_base = OTHER; note = 2'-O-methyl-cytidine-3'-phosphate
  modified_base 8: mod_base = OTHER; note = 2'-deoxy-2'-fluoro-uridine-3'-phosphate
  modified_base 9: mod_base = OTHER; note = 2'-deoxy-2'-fluoro-cytidine-3'-phosphate
  modified_base 10: mod_base = OTHER; note = 2'-O-methyl-uridine-3'-phosphate
  modified_base 11: mod_base = OTHER; note = 2'-O-methyl-adenosine-3'-phosphate
  modified_base 12: mod_base = OTHER; note = 2'-O-methyl-guanosine-3'-phosphate
  modified_base 13: mod_base = OTHER; note = 2'-O-methyl-cytidine-3'-phosphate
  modified_base 14: mod_base = OTHER; note = 2'-deoxy-2'-fluoro-uridine-3'-phosphate
  modified_base 15: mod_base = OTHER; note = 2'-O-methyl-uridine-3'-phosphate
  modified_base 16: mod_base = OTHER; note = 2'-deoxy-2'-fluoro-adenosine-3'-phosphate
  modified_base 17: mod_base = OTHER; note = 2'-O-methyl-cytidine-3'-phosphate
  modified_base 18: mod_base = OTHER; note = 2'-O-methyl-uridine-3'-phosphate
  modified_base 19: mod_base = OTHER; note = 2'-O-methyl-uridine-3'-phosphorothioate
  modified_base 20: mod_base = OTHER; note = 2'-O-methyl-uridine-3'-phosphorothioate
  modified_base 21: mod_base = OTHER; note = 2'-O-methyl-uridine-3'-phosphate
tattttctctagcttactttt

SEQ ID NO: 2503 - RNA, 21 nt, synthetic construct
  source 1..21: mol_type = other RNA
  modified_base 1: mod_base = OTHER; note = 2'-O-methyl-uridine-3'-phosphorothioate
  modified_base 2: mod_base = OTHER; note = 2'-deoxy-2'-fluoro-cytidine-3'-phosphorothioate
  modified_base 3: mod_base = OTHER; note = 2'-O-methyl-adenosine-3'-phosphate
  modified_base 4: mod_base = OTHER; note = 2'-O-methyl-uridine-3'-phosphate
  modified_base 5: mod_base = OTHER; note = 2'-O-methyl-uridine-3'-phosphate
  modified_base 6: mod_base = OTHER; note = 2'-deoxy-2'-fluoro-uridine-3'-phosphate
  modified_base 7: mod_base = OTHER; note = 2'-O-methyl-uridine-3'-phosphate
  modified_base 8: mod_base = OTHER; note = 2'-deoxy-2'-fluoro-cytidine-3'-phosphate
  modified_base 9: mod_base = OTHER; note = 2'-deoxy-2'-fluoro-uridine-3'-phosphate
  modified_base 10: mod_base = OTHER; note = 2'-O-methyl-cytidine-3'-phosphate
  modified_base 11: mod_base = OTHER; note = 2'-O-methyl-uridine-3'-phosphate
  modified_base 12: mod_base = OTHER; note = 2'-O-methyl-adenosine-3'-phosphate
  modified_base 13: mod_base = OTHER; note = 2'-O-methyl-guanosine-3'-phosphate
  modified_base 14: mod_base = OTHER; note = 2'-deoxy-2'-fluoro-cytidine-3'-phosphate
  modified_base 15: mod_base = OTHER; note = 2'-O-methyl-uridine-3'-phosphate
  modified_base 16: mod_base = OTHER; note = 2'-deoxy-2'-fluoro-uridine-3'-phosphate
  modified_base 17: mod_base = OTHER; note = 2'-O-methyl-adenosine-3'-phosphate
  modified_base 18: mod_base = OTHER; note = 2'-O-methyl-cytidine-3'-phosphate
  modified_base 19: mod_base = OTHER; note = 2'-O-methyl-uridine-3'-phosphorothioate
  modified_base 20: mod_base = OTHER; note = 2'-O-methyl-uridine-3'-phosphorothioate
  modified_base 21: mod_base = OTHER; note = 2'-O-methyl-uridine-3'-phosphate
tcattttctctagcttacttt

SEQ ID NO: 2504 - RNA, 21 nt, synthetic construct
  source 1..21: mol_type = other RNA
  modified_base 1: mod_base = OTHER; note = 2'-O-methyl-uridine-3'-phosphorothioate
  modified_base 2: mod_base = OTHER; note = 2'-deoxy-2'-fluoro-adenosine-3'-phosphorothioate
  modified_base 3: mod_base = OTHER; note = 2'-O-methyl-cytidine-3'-phosphate
  modified_base 4: mod_base = OTHER; note = 2'-O-methyl-adenosine-3'-phosphate
  modified_base 5: mod_base = OTHER; note = 2'-O-methyl-uridine-3'-phosphate
  modified_base 6: mod_base = OTHER; note = 2'-deoxy-2'-fluoro-uridine-3'-phosphate
  modified_base 7: mod_base = OTHER; note = 2'-O-methyl-uridine-3'-phosphate
  modified_base 8: mod_base = OTHER; note = 2'-deoxy-2'-fluoro-uridine-3'-phosphate
  modified_base 9: mod_base = OTHER; note = 2'-deoxy-2'-fluoro-cytidine-3'-phosphate
  modified_base 10: mod_base = OTHER; note = 2'-O-methyl-uridine-3'-phosphate
  modified_base 11: mod_base = OTHER; note = 2'-O-methyl-cytidine-3'-phosphate
  modified_base 12: mod_base = OTHER; note = 2'-O-methyl-uridine-3'-phosphate
  modified_base 13: mod_base = OTHER; note = 2'-O-methyl-adenosine-3'-phosphate
  modified_base 14: mod_base = OTHER; note = 2'-deoxy-2'-fluoro-guanosine-3'-phosphate
  modified_base 15: mod_base = OTHER; note = 2'-O-methyl-cytidine-3'-phosphate
  modified_base 16: mod_base = OTHER; note = 2'-deoxy-2'-fluoro-uridine-3'-phosphate
  modified_base 17: mod_base = OTHER; note = 2'-O-methyl-uridine-3'-phosphate
  modified_base 18: mod_base = OTHER; note = 2'-O-methyl-adenosine-3'-phosphate
  modified_base 19: mod_base = OTHER; note = 2'-O-methyl-cytidine-3'-phosphorothioate
  modified_base 20: mod_base = OTHER; note = 2'-O-methyl-uridine-3'-phosphorothioate
  modified_base 21: mod_base = OTHER; note = 2'-O-methyl-uridine-3'-phosphate
tacattttctctagcttactt

SEQ ID NO: 2505 - RNA, 21 nt, synthetic construct
  source 1..21: mol_type = other RNA
  modified_base 1: mod_base = OTHER; note = 2'-O-methyl-uridine-3'-phosphorothioate
  modified_base 2: mod_base = OTHER; note = 2'-deoxy-2'-fluoro-cytidine-3'-phosphorothioate
  modified_base 3: mod_base = OTHER; note = 2'-O-methyl-cytidine-3'-phosphate
  modified_base 4: mod_base = OTHER; note = 2'-O-methyl-adenosine-3'-phosphate
  modified_base 5: mod_base = OTHER; note = 2'-O-methyl-cytidine-3'-phosphate
  modified_base 6: mod_base = OTHER; note = 2'-deoxy-2'-fluoro-uridine-3'-phosphate
  modified_base 7: mod_base = OTHER; note = 2'-O-methyl-uridine-3'-phosphate
  modified_base 8: mod_base = OTHER; note = 2'-deoxy-2'-fluoro-cytidine-3'-phosphate
  modified_base 9: mod_base = OTHER; note = 2'-deoxy-2'-fluoro-cytidine-3'-phosphate
  modified_base 10: mod_base = OTHER; note = 2'-O-methyl-adenosine-3'-phosphate
  modified_base 11: mod_base = OTHER; note = 2'-O-methyl-uridine-3'-phosphate
  modified_base 12: mod_base = OTHER; note = 2'-O-methyl-uridine-3'-phosphate
  modified_base 13: mod_base = OTHER; note = 2'-O-methyl-uridine-3'-phosphate
  modified_base 14: mod_base = OTHER; note = 2'-deoxy-2'-fluoro-adenosine-3'-phosphate
  modified_base 15: mod_base = OTHER; note = 2'-O-methyl-adenosine-3'-phosphate
  modified_base 16: mod_base = OTHER; note = 2'-deoxy-2'-fluoro-uridine-3'-phosphate
  modified_base 17: mod_base = OTHER; note = 2'-O-methyl-guanosine-3'-phosphate
  modified_base 18: mod_base = OTHER; note = 2'-O-methyl-adenosine-3'-phosphate
  modified_base 19: mod_base = OTHER; note = 2'-O-methyl-adenosine-3'-phosphorothioate
  modified_base 20: mod_base = OTHER; note = 2'-O-methyl-uridine-3'-phosphorothioate
  modified_base 21: mod_base = OTHER; note = 2'-O-methyl-uridine-3'-phosphate
tccacttccatttaatgaatt

SEQ ID NO: 2506 - RNA, 21 nt, synthetic construct
  source 1..21: mol_type = other RNA
  modified_base 1: mod_base = OTHER; note = 2'-O-methyl-uridine-3'-phosphorothioate
  modified_base 2: mod_base = OTHER; note = 2'-deoxy-2'-fluoro-cytidine-3'-phosphorothioate
  modified_base 3: mod_base = OTHER; note = 2'-O-methyl-adenosine-3'-phosphate
  modified_base 4: mod_base = OTHER; note = 2'-O-methyl-adenosine-3'-phosphate
  modified_base 5: mod_base = OTHER; note = 2'-O-methyl-uridine-3'-phosphate
  modified_base 6: mod_base = OTHER; note = 2'-deoxy-2'-fluoro-guanosine-3'-phosphate
  modified_base 7: mod_base = OTHER; note = 2'-O-methyl-adenosine-3'-phosphate
  modified_base 8: mod_base = OTHER; note = 2'-deoxy-2'-fluoro-guanosine-3'-phosphate
  modified_base 9: mod_base = OTHER; note = 2'-deoxy-2'-fluoro-adenosine-3'-phosphate
  modified_base 10: mod_base = OTHER; note = 2'-O-methyl-adenosine-3'-phosphate
  modified_base 11: mod_base = OTHER; note = 2'-O-methyl-uridine-3'-phosphate
  modified_base 12: mod_base = OTHER; note = 2'-O-methyl-guanosine-3'-phosphate
  modified_base 13: mod_base = OTHER; note = 2'-O-methyl-adenosine-3'-phosphate
  modified_base 14: mod_base = OTHER; note = 2'-deoxy-2'-fluoro-adenosine-3'-phosphate
  modified_base 15: mod_base = OTHER; note = 2'-O-methyl-guanosine-3'-phosphate
  modified_base 16: mod_base = OTHER; note = 2'-deoxy-2'-fluoro-adenosine-3'-phosphate
  modified_base 17: mod_base = OTHER; note = 2'-O-methyl-cytidine-3'-phosphate
  modified_base 18: mod_base = OTHER; note = 2'-O-methyl-uridine-3'-phosphate
  modified_base 19: mod_base = OTHER; note = 2'-O-methyl-uridine-3'-phosphorothioate
  modified_base 20: mod_base = OTHER; note = 2'-O-methyl-uridine-3'-phosphorothioate
  modified_base 21: mod_base = OTHER; note = 2'-O-methyl-uridine-3'-phosphate
tcaatgagaatgaagactttt

SEQ ID NO: 2507 - RNA, 21 nt, synthetic construct
  source 1..21: mol_type = other RNA
  modified_base 1: mod_base = OTHER; note = 2'-O-methyl-uridine-3'-phosphorothioate
  modified_base 2: mod_base = OTHER; note = 2'-deoxy-2'-fluoro-adenosine-3'-phosphorothioate
  modified_base 3: mod_base = OTHER; note = 2'-O-methyl-cytidine-3'-phosphate
  modified_base 4: mod_base = OTHER; note = 2'-O-methyl-adenosine-3'-phosphate
  modified_base 5: mod_base = OTHER; note = 2'-O-methyl-adenosine-3'-phosphate
  modified_base 6: mod_base = OTHER; note = 2'-deoxy-2'-fluoro-uridine-3'-phosphate
  modified_base 7: mod_base = OTHER; note = 2'-O-methyl-guanosine-3'-phosphate
  modified_base 8: mod_base = OTHER; note = 2'-deoxy-2'-fluoro-adenosine-3'-phosphate
  modified_base 9: mod_base = OTHER; note = 2'-deoxy-2'-fluoro-guanosine-3'-phosphate
  modified_base 10: mod_base = OTHER; note = 2'-O-methyl-adenosine-3'-phosphate
  modified_base 11: mod_base = OTHER; note = 2'-O-methyl-adenosine-3'-phosphate
  modified_base 12: mod_base = OTHER; note = 2'-O-methyl-uridine-3'-phosphate
  modified_base 13: mod_base = OTHER; note = 2'-O-methyl-guanosine-3'-phosphate
  modified_base 14: mod_base = OTHER; note = 2'-deoxy-2'-fluoro-adenosine-3'-phosphate
  modified_base 15: mod_base = OTHER; note = 2'-O-methyl-adenosine-3'-phosphate
  modified_base 16: mod_base = OTHER; note = 2'-deoxy-2'-fluoro-guanosine-3'-phosphate
  modified_base 17: mod_base = OTHER; note = 2'-O-methyl-adenosine-3'-phosphate
  modified_base 18: mod_base = OTHER; note = 2'-O-methyl-cytidine-3'-phosphate
  modified_base 19: mod_base = OTHER; note = 2'-O-methyl-uridine-3'-phosphorothioate
  modified_base 20: mod_base = OTHER; note = 2'-O-methyl-uridine-3'-phosphorothioate
  modified_base 21: mod_base = OTHER; note = 2'-O-methyl-uridine-3'-phosphate
tacaatgagaatgaagacttt

SEQ ID NO: 2508 - RNA, 21 nt, synthetic construct
  source 1..21: mol_type = other RNA
  modified_base 1: mod_base = OTHER; note = 2'-O-methyl-uridine-3'-phosphorothioate
  modified_base 2: mod_base = OTHER; note = 2'-deoxy-2'-fluoro-guanosine-3'-phosphorothioate
  modified_base 3: mod_base = OTHER; note = 2'-O-methyl-adenosine-3'-phosphate
  modified_base 4: mod_base = OTHER; note = 2'-O-methyl-cytidine-3'-phosphate
  modified_base 5: mod_base = OTHER; note = 2'-O-methyl-adenosine-3'-phosphate
  modified_base 6: mod_base = OTHER; note = 2'-deoxy-2'-fluoro-adenosine-3'-phosphate
  modified_base 7: mod_base = OTHER; note = 2'-O-methyl-uridine-3'-phosphate
  modified_base 8: mod_base = OTHER; note = 2'-deoxy-2'-fluoro-guanosine-3'-phosphate
  modified_base 9: mod_base = OTHER; note = 2'-deoxy-2'-fluoro-adenosine-3'-phosphate
  modified_base 10: mod_base = OTHER; note = 2'-O-methyl-guanosine-3'-phosphate
  modified_base 11: mod_base = OTHER; note = 2'-O-methyl-adenosine-3'-phosphate
  modified_base 12: mod_base = OTHER; note = 2'-O-methyl-adenosine-3'-phosphate
  modified_base 13: mod_base = OTHER; note = 2'-O-methyl-uridine-3'-phosphate
  modified_base 14: mod_base = OTHER; note = 2'-deoxy-2'-fluoro-guanosine-3'-phosphate
  modified_base 15: mod_base = OTHER; note = 2'-O-methyl-adenosine-3'-phosphate
  modified_base 16: mod_base = OTHER; note = 2'-deoxy-2'-fluoro-adenosine-3'-phosphate
  modified_base 17: mod_base = OTHER; note = 2'-O-methyl-guanosine-3'-phosphate
  modified_base 18: mod_base = OTHER; note = 2'-O-methyl-adenosine-3'-phosphate
  modified_base 19: mod_base = OTHER; note = 2'-O-methyl-cytidine-3'-phosphorothioate
  modified_base 20: mod_base = OTHER; note = 2'-O-methyl-uridine-3'-phosphorothioate
  modified_base 21: mod_base = OTHER; note = 2'-O-methyl-uridine-3'-phosphate
tgacaatgagaatgaagactt

SEQ ID NO: 2509 - RNA, 21 nt, synthetic construct
  source 1..21: mol_type = other RNA
  modified_base 1: mod_base = OTHER; note = 2'-O-methyl-uridine-3'-phosphorothioate
  modified_base 2: mod_base = OTHER; note = 2'-deoxy-2'-fluoro-adenosine-3'-phosphorothioate
  modified_base 3: mod_base = OTHER; note = 2'-O-methyl-guanosine-3'-phosphate
  modified_base 4: mod_base = OTHER; note = 2'-O-methyl-adenosine-3'-phosphate
  modified_base 5: mod_base = OTHER; note = 2'-O-methyl-cytidine-3'-phosphate
  modified_base 6: mod_base = OTHER; note = 2'-deoxy-2'-fluoro-adenosine-3'-phosphate
  modified_base 7: mod_base = OTHER; note = 2'-O-methyl-adenosine-3'-phosphate
  modified_base 8: mod_base = OTHER; note = 2'-deoxy-2'-fluoro-uridine-3'-phosphate
  modified_base 9: mod_base = OTHER; note = 2'-deoxy-2'-fluoro-guanosine-3'-phosphate
  modified_base 10: mod_base = OTHER; note = 2'-O-methyl-adenosine-3'-phosphate
  modified_base 11: mod_base = OTHER; note = 2'-O-methyl-guanosine-3'-phosphate
  modified_base 12: mod_base = OTHER; note = 2'-O-methyl-adenosine-3'-phosphate
  modified_base 13: mod_base = OTHER; note = 2'-O-methyl-adenosine-3'-phosphate
  modified_base 14: mod_base = OTHER; note = 2'-deoxy-2'-fluoro-uridine-3'-phosphate
  modified_base 15: mod_base = OTHER; note = 2'-O-methyl-guanosine-3'-phosphate
  modified_base 16: mod_base = OTHER; note = 2'-deoxy-2'-fluoro-adenosine-3'-phosphate
  modified_base 17: mod_base = OTHER; note = 2'-O-methyl-adenosine-3'-phosphate
  modified_base 18: mod_base = OTHER; note = 2'-O-methyl-guanosine-3'-phosphate
  modified_base 19: mod_base = OTHER; note = 2'-O-methyl-adenosine-3'-phosphorothioate
  modified_base 20: mod_base = OTHER; note = 2'-O-methyl-uridine-3'-phosphorothioate
  modified_base 21: mod_base = OTHER; note = 2'-O-methyl-uridine-3'-phosphate
tagacaatgagaatgaagatt

SEQ ID NO: 2510 - RNA, 21 nt, synthetic construct
  source 1..21: mol_type = other RNA
  modified_base 1: mod_base = OTHER; note = 2'-O-methyl-uridine-3'-phosphorothioate
  modified_base 2: mod_base = OTHER; note = 2'-deoxy-2'-fluoro-cytidine-3'-phosphorothioate
  modified_base 3: mod_base = OTHER; note = 2'-O-methyl-cytidine-3'-phosphate
  modified_base 4: mod_base = OTHER; note = 2'-O-methyl-adenosine-3'-phosphate
  modified_base 5: mod_base = OTHER; note = 2'-O-methyl-cytidine-3'-phosphate
  modified_base 6: mod_base = OTHER; note = 2'-deoxy-2'-fluoro-adenosine-3'-phosphate
  modified_base 7: mod_base = OTHER; note = 2'-O-methyl-cytidine-3'-phosphate
  modified_base 8: mod_base = OTHER; note = 2'-deoxy-2'-fluoro-cytidine-3'-phosphate
  modified_base 9: mod_base = OTHER; note = 2'-deoxy-2'-fluoro-cytidine-3'-phosphate
  modified_base 10: mod_base = OTHER; note = 2'-O-methyl-cytidine-3'-phosphate
  modified_base 11: mod_base = OTHER; note = 2'-O-methyl-uridine-3'-phosphate
  modified_base 12: mod_base = OTHER; note = 2'-O-methyl-adenosine-3'-phosphate
  modified_base 13: mod_base = OTHER; note = 2'-O-methyl-adenosine-3'-phosphate
  modified_base 14: mod_base = OTHER; note = 2'-deoxy-2'-fluoro-guanosine-3'-phosphate
  modified_base 15: mod_base = OTHER; note = 2'-O-methyl-adenosine-3'-phosphate
  modified_base 16: mod_base = OTHER; note = 2'-deoxy-2'-fluoro-cytidine-3'-phosphate
  modified_base 17: mod_base = OTHER; note = 2'-O-methyl-adenosine-3'-phosphate
  modified_base 18: mod_base = OTHER; note = 2'-O-methyl-adenosine-3'-phosphate
  modified_base 19: mod_base = OTHER; note = 2'-O-methyl-guanosine-3'-phosphorothioate
  modified_base 20: mod_base = OTHER; note = 2'-O-methyl-uridine-3'-phosphorothioate
  modified_base 21: mod_base = OTHER; note = 2'-O-methyl-uridine-3'-phosphate
tccacacccctaagacaagtt

SEQ ID NO: 2511 - RNA, 21 nt, synthetic construct
  source 1..21: mol_type = other RNA
  modified_base 1: mod_base = OTHER; note = 2'-O-methyl-uridine-3'-phosphorothioate
  modified_base 2: mod_base = OTHER; note = 2'-deoxy-2'-fluoro-uridine-3'-phosphorothioate
  modified_base 3: mod_base = OTHER; note = 2'-O-methyl-cytidine-3'-phosphate
  modified_base 4: mod_base = OTHER; note = 2'-O-methyl-cytidine-3'-phosphate
  modified_base 5: mod_base = OTHER; note = 2'-O-methyl-adenosine-3'-phosphate
  modified_base 6: mod_base = OTHER; note = 2'-deoxy-2'-fluoro-cytidine-3'-phosphate
  modified_base 7: mod_base = OTHER; note = 2'-O-methyl-uridine-3'-phosphate
  modified_base 8: mod_base = OTHER; note = 2'-deoxy-2'-fluoro-uridine-3'-phosphate
  modified_base 9: mod_base = OTHER; note = 2'-deoxy-2'-fluoro-adenosine-3'-phosphate
  modified_base 10: mod_base = OTHER; note = 2'-O-methyl-uridine-3'-phosphate
  modified_base 11: mod_base = OTHER; note = 2'-O-methyl-adenosine-3'-phosphate
  modified_base 12: mod_base = OTHER; note = 2'-O-methyl-cytidine-3'-phosphate
  modified_base 13: mod_base = OTHER; note = 2'-O-methyl-adenosine-3'-phosphate
  modified_base 14: mod_base = OTHER; note = 2'-deoxy-2'-fluoro-uridine-3'-phosphate
  modified_base 15: mod_base = OTHER; note = 2'-O-methyl-guanosine-3'-phosphate
  modified_base 16: mod_base = OTHER; note = 2'-deoxy-2'-fluoro-adenosine-3'-phosphate
  modified_base 17: mod_base = OTHER; note = 2'-O-methyl-adenosine-3'-phosphate
  modified_base 18: mod_base = OTHER; note = 2'-O-methyl-uridine-3'-phosphate
  modified_base 19: mod_base = OTHER; note = 2'-O-methyl-adenosine-3'-phosphorothioate
  modified_base 20: mod_base = OTHER; note = 2'-O-methyl-uridine-3'-phosphorothioate
  modified_base 21: mod_base = OTHER; note = 2'-O-methyl-uridine-3'-phosphate
ttccacttatacatgaatatt

SEQ ID NO: 2512 - RNA, 21 nt, synthetic construct
  source 1..21: mol_type = other RNA
  modified_base 1: mod_base = OTHER; note = 2'-O-methyl-uridine-3'-phosphorothioate
  modified_base 2: mod_base = OTHER; note = 2'-deoxy-2'-fluoro-guanosine-3'-phosphorothioate
  modified_base 3: mod_base = OTHER; note = 2'-O-methyl-guanosine-3'-phosphate
  modified_base 4: mod_base = OTHER; note = 2'-O-methyl-guanosine-3'-phosphate
  modified_base 5: mod_base = OTHER; note = 2'-O-methyl-uridine-3'-phosphate
  modified_base 6: mod_base = OTHER; note = 2'-deoxy-2'-fluoro-cytidine-3'-phosphate
  modified_base 7: mod_base = OTHER; note = 2'-O-methyl-cytidine-3'-phosphate
  modified_base 8: mod_base = OTHER; note = 2'-deoxy-2'-fluoro-adenosine-3'-phosphate
  modified_base 9: mod_base = OTHER; note = 2'-deoxy-2'-fluoro-cytidine-3'-phosphate
  modified_base 10: mod_base = OTHER; note = 2'-O-methyl-uridine-3'-phosphate
  modified_base 11: mod_base = OTHER; note = 2'-O-methyl-uridine-3'-phosphate
  modified_base 12: mod_base = OTHER; note = 2'-O-methyl-adenosine-3'-phosphate
  modified_base 13: mod_base = OTHER; note = 2'-O-methyl-uridine-3'-phosphate
  modified_base 14: mod_base = OTHER; note = 2'-deoxy-2'-fluoro-adenosine-3'-phosphate
  modified_base 15: mod_base = OTHER; note = 2'-O-methyl-cytidine-3'-phosphate
  modified_base 16: mod_base = OTHER; note = 2'-deoxy-2'-fluoro-adenosine-3'-phosphate
  modified_base 17: mod_base = OTHER; note = 2'-O-methyl-uridine-3'-phosphate
  modified_base 18: mod_base = OTHER; note = 2'-O-methyl-guanosine-3'-phosphate
  modified_base 19: mod_base = OTHER; note = 2'-O-methyl-adenosine-3'-phosphorothioate
  modified_base 20: mod_base = OTHER; note = 2'-O-methyl-uridine-3'-phosphorothioate
  modified_base 21: mod_base = OTHER; note = 2'-O-methyl-uridine-3'-phosphate
tgggtccacttatacatgatt

SEQ ID NO: 2513 - RNA, 21 nt, synthetic construct
  source 1..21: mol_type = other RNA
  modified_base 1: mod_base = OTHER; note 5'-vinylphosphonate-2'-O-methyl-uridine-3'-phosphorothioate
  modified_base 2: mod_base = OTHER; note = 2'-deoxy-2'-fluoro-adenosine-3'-phosphorothioate
  modified_base 3: mod_base = OTHER; note = 2'-O-methyl-uridine-3'-phosphate
  modified_base 4: mod_base = OTHER; note = 2'-O-methyl-cytidine-3'-phosphate
  modified_base 5: mod_base = OTHER; note = 2'-O-methyl-uridine-3'-phosphate
  modified_base 6: mod_base = OTHER; note = 2'-deoxy-2'-fluoro-uridine-3'-phosphate
  modified_base 7: mod_base = OTHER; note = 2'-O-methyl-guanosine-3'-phosphate
  modified_base 8: mod_base = OTHER; note = 2'-deoxy-2'-fluoro-adenosine-3'-phosphate
  modified_base 9: mod_base = OTHER; note = 2'-deoxy-2'-fluoro-cytidine-3'-phosphate
  modified_base 10: mod_base = OTHER; note = 2'-O-methyl-cytidine-3'-phosphate
  modified_base 11: mod_base = OTHER; note = 2'-O-methyl-uridine-3'-phosphate
  modified_base 12: mod_base = OTHER; note = 2'-O-methyl-uridine-3'-phosphate
  modified_base 13: mod_base = OTHER; note = 2'-O-methyl-uridine-3'-phosphate
  modified_base 14: mod_base = OTHER; note = 2'-deoxy-2'-fluoro-uridine-3'-phosphate
  modified_base 15: mod_base = OTHER; note = 2'-O-methyl-cytidine-3'-phosphate
  modified_base 16: mod_base = OTHER; note = 2'-deoxy-2'-fluoro-adenosine-3'-phosphate
  modified_base 17: mod_base = OTHER; note = 2'-O-methyl-cytidine-3'-phosphate
  modified_base 18: mod_base = OTHER; note = 2'-O-methyl-adenosine-3'-phosphate
  modified_base 19: mod_base = OTHER; note = 2'-O-methyl-adenosine-3'-phosphorothioate
  modified_base 20: mod_base = OTHER; note = 2'-O-methyl-uridine-3'-phosphorothioate
  modified_base 21: mod_base = OTHER; note = 2'-O-methyl-uridine-3'-phosphate
tatcttgaccttttcacaatt

SEQ ID NO: 2514 - RNA, 21 nt, synthetic construct
  source 1..21: mol_type = other RNA
  modified_base 1: mod_base = OTHER; note 5'-vinylphosphonate-2'-O-methyl-uridine-3'-phosphorothioate
  modified_base 2: mod_base = OTHER; note = 2'-deoxy-2'-fluoro-adenosine-3'-phosphorothioate
  modified_base 3: mod_base = OTHER; note = 2'-O-methyl-adenosine-3'-phosphate
  modified_base 4: mod_base = OTHER; note = 2'-O-methyl-uridine-3'-phosphate
  modified_base 5: mod_base = OTHER; note = 2'-O-methyl-cytidine-3'-phosphate
  modified_base 6: mod_base = OTHER; note = 2'-deoxy-2'-fluoro-uridine-3'-phosphate
  modified_base 7: mod_base = OTHER; note = 2'-O-methyl-uridine-3'-phosphate
  modified_base 8: mod_base = OTHER; note = 2'-deoxy-2'-fluoro-guanosine-3'-phosphate
  modified_base 9: mod_base = OTHER; note = 2'-deoxy-2'-fluoro-adenosine-3'-phosphate
  modified_base 10: mod_base = OTHER; note = 2'-O-methyl-cytidine-3'-phosphate
  modified_base 11: mod_base = OTHER; note = 2'-O-methyl-cytidine-3'-phosphate
  modified_base 12: mod_base = OTHER; note = 2'-O-methyl-uridine-3'-phosphate
  modified_base 13: mod_base = OTHER; note = 2'-O-methyl-uridine-3'-phosphate
  modified_base 14: mod_base = OTHER; note = 2'-deoxy-2'-fluoro-uridine-3'-phosphate
  modified_base 15: mod_base = OTHER; note = 2'-O-methyl-uridine-3'-phosphate
  modified_base 16: mod_base = OTHER; note = 2'-deoxy-2'-fluoro-cytidine-3'-phosphate
  modified_base 17: mod_base = OTHER; note = 2'-O-methyl-adenosine-3'-phosphate
  modified_base 18: mod_base = OTHER; note = 2'-O-methyl-cytidine-3'-phosphate
  modified_base 19: mod_base = OTHER; note = 2'-O-methyl-adenosine-3'-phosphorothioate
  modified_base 20: mod_base = OTHER; note = 2'-O-methyl-uridine-3'-phosphorothioate
  modified_base 21: mod_base = OTHER; note = 2'-O-methyl-uridine-3'-phosphate
taatcttgaccttttcacatt

SEQ ID NO: 2515 - RNA, 21 nt, synthetic construct
  source 1..21: mol_type = other RNA
  modified_base 1: mod_base = OTHER; note 5'-vinylphosphonate-2'-O-methyl-uridine-3'-phosphorothioate
  modified_base 2: mod_base = OTHER; note = 2'-deoxy-2'-fluoro-uridine-3'-phosphorothioate
  modified_base 3: mod_base = OTHER; note = 2'-O-methyl-cytidine-3'-phosphate
  modified_base 4: mod_base = OTHER; note = 2'-O-methyl-uridine-3'-phosphate
  modified_base 5: mod_base = OTHER; note = 2'-O-methyl-uridine-3'-phosphate
  modified_base 6: mod_base = OTHER; note = 2'-deoxy-2'-fluoro-adenosine-3'-phosphate
  modified_base 7: mod_base = OTHER; note = 2'-O-methyl-adenosine-3'-phosphate
  modified_base 8: mod_base = OTHER; note = 2'-deoxy-2'-fluoro-uridine-3'-phosphate
  modified_base 9: mod_base = OTHER; note = 2'-deoxy-2'-fluoro-cytidine-3'-phosphate
  modified_base 10: mod_base = OTHER; note = 2'-O-methyl-uridine-3'-phosphate
  modified_base 11: mod_base = OTHER; note = 2'-O-methyl-uridine-3'-phosphate
  modified_base 12: mod_base = OTHER; note = 2'-O-methyl-guanosine-3'-phosphate
  modified_base 13: mod_base = OTHER; note = 2'-O-methyl-adenosine-3'-phosphate
  modified_base 14: mod_base = OTHER; note = 2'-deoxy-2'-fluoro-cytidine-3'-phosphate
  modified_base 15: mod_base = OTHER; note = 2'-O-methyl-cytidine-3'-phosphate
  modified_base 16: mod_base = OTHER; note = 2'-deoxy-2'-fluoro-uridine-3'-phosphate
  modified_base 17: mod_base = OTHER; note = 2'-O-methyl-uridine-3'-phosphate
  modified_base 18: mod_base = OTHER; note = 2'-O-methyl-uridine-3'-phosphate
  modified_base 19: mod_base = OTHER; note = 2'-O-methyl-uridine-3'-phosphorothioate
  modified_base 20: mod_base = OTHER; note = 2'-O-methyl-uridine-3'-phosphorothioate
  modified_base 21: mod_base = OTHER; note = 2'-O-methyl-uridine-3'-phosphate
ttcttaatcttgacctttttt

SEQ ID NO: 2516 - RNA, 21 nt, synthetic construct
  source 1..21: mol_type = other RNA
  modified_base 1: mod_base = OTHER; note 5'-vinylphosphonate-2'-O-methyl-uridine-3'-phosphorothioate
  modified_base 2: mod_base = OTHER; note = 2'-deoxy-2'-fluoro-adenosine-3'-phosphorothioate
  modified_base 3: mod_base = OTHER; note = 2'-O-methyl-adenosine-3'-phosphate
  modified_base 4: mod_base = OTHER; note = 2'-O-methyl-adenosine-3'-phosphate
  modified_base 5: mod_base = OTHER; note = 2'-O-methyl-cytidine-3'-phosphate
  modified_base 6: mod_base = OTHER; note = 2'-deoxy-2'-fluoro-uridine-3'-phosphate
  modified_base 7: mod_base = OTHER; note = 2'-O-methyl-cytidine-3'-phosphate
  modified_base 8: mod_base = OTHER; note = 2'-deoxy-2'-fluoro-uridine-3'-phosphate
  modified_base 9: mod_base = OTHER; note = 2'-deoxy-2'-fluoro-uridine-3'-phosphate
  modified_base 10: mod_base = OTHER; note = 2'-O-methyl-cytidine-3'-phosphate
  modified_base 11: mod_base = OTHER; note = 2'-O-methyl-uridine-3'-phosphate
  modified_base 12: mod_base = OTHER; note = 2'-O-methyl-adenosine-3'-phosphate
  modified_base 13: mod_base = OTHER; note = 2'-O-methyl-cytidine-3'-phosphate
  modified_base 14: mod_base = OTHER; note = 2'-deoxy-2'-fluoro-uridine-3'-phosphate
  modified_base 15: mod_base = OTHER; note = 2'-O-methyl-cytidine-3'-phosphate
  modified_base 16: mod_base = OTHER; note = 2'-deoxy-2'-fluoro-adenosine-3'-phosphate
  modified_base 17: mod_base = OTHER; note = 2'-O-methyl-guanosine-3'-phosphate
  modified_base 18: mod_base = OTHER; note = 2'-O-methyl-guanosine-3'-phosphate
  modified_base 19: mod_base = OTHER; note = 2'-O-methyl-adenosine-3'-phosphorothioate
  modified_base 20: mod_base = OTHER; note = 2'-O-methyl-uridine-3'-phosphorothioate
  modified_base 21: mod_base = OTHER; note = 2'-O-methyl-uridine-3'-phosphate
taaactcttctactcaggatt

SEQ ID NO: 2517 - RNA, 21 nt, synthetic construct
  source 1..21: mol_type = other RNA
  modified_base 1: mod_base = OTHER; note 5'-vinylphosphonate-2'-O-methyl-uridine-3'-phosphorothioate
  modified_base 2: mod_base = OTHER; note = 2'-deoxy-2'-fluoro-adenosine-3'-phosphorothioate
  modified_base 3: mod_base = OTHER; note = 2'-O-methyl-guanosine-3'-phosphate
  modified_base 4: mod_base = OTHER; note = 2'-O-methyl-adenosine-3'-phosphate
  modified_base 5: mod_base = OTHER; note = 2'-O-methyl-adenosine-3'-phosphate
  modified_base 6: mod_base = OTHER; note = 2'-deoxy-2'-fluoro-adenosine-3'-phosphate
  modified_base 7: mod_base = OTHER; note = 2'-O-methyl-cytidine-3'-phosphate
  modified_base 8: mod_base = OTHER; note = 2'-deoxy-2'-fluoro-uridine-3'-phosphate
  modified_base 9: mod_base = OTHER; note = 2'-deoxy-2'-fluoro-cytidine-3'-phosphate
  modified_base 10: mod_base = OTHER; note = 2'-O-methyl-uridine-3'-phosphate
  modified_base 11: mod_base = OTHER; note = 2'-O-methyl-uridine-3'-phosphate
  modified_base 12: mod_base = OTHER; note = 2'-O-methyl-cytidine-3'-phosphate
  modified_base 13: mod_base = OTHER; note = 2'-O-methyl-uridine-3'-phosphate
  modified_base 14: mod_base = OTHER; note = 2'-deoxy-2'-fluoro-adenosine-3'-phosphate
  modified_base 15: mod_base = OTHER; note = 2'-O-methyl-cytidine-3'-phosphate
  modified_base 16: mod_base = OTHER; note = 2'-deoxy-2'-fluoro-uridine-3'-phosphate
  modified_base 17: mod_base = OTHER; note = 2'-O-methyl-cytidine-3'-phosphate
  modified_base 18: mod_base = OTHER; note = 2'-O-methyl-adenosine-3'-phosphate
  modified_base 19: mod_base = OTHER; note = 2'-O-methyl-guanosine-3'-phosphorothioate
  modified_base 20: mod_base = OTHER; note = 2'-O-methyl-uridine-3'-phosphorothioate
  modified_base 21: mod_base = OTHER; note = 2'-O-methyl-uridine-3'-phosphate
tagaaactcttctactcagtt

SEQ ID NO: 2518 - RNA, 21 nt, synthetic construct
  source 1..21: mol_type = other RNA
  modified_base 1: mod_base = OTHER; note 5'-vinylphosphonate-2'-O-methyl-uridine-3'-phosphorothioate
  modified_base 2: mod_base = OTHER; note = 2'-deoxy-2'-fluoro-uridine-3'-phosphorothioate
  modified_base 3: mod_base = OTHER; note = 2'-O-methyl-uridine-3'-phosphate
  modified_base 4: mod_base = OTHER; note = 2'-O-methyl-cytidine-3'-phosphate
  modified_base 5: mod_base = OTHER; note = 2'-O-methyl-adenosine-3'-phosphate
  modified_base 6: mod_base = OTHER; note = 2'-deoxy-2'-fluoro-uridine-3'-phosphate
  modified_base 7: mod_base = OTHER; note = 2'-O-methyl-guanosine-3'-phosphate
  modified_base 8: mod_base = OTHER; note = 2'-deoxy-2'-fluoro-uridine-3'-phosphate
  modified_base 9: mod_base = OTHER; note = 2'-deoxy-2'-fluoro-uridine-3'-phosphate
  modified_base 10: mod_base = OTHER; note = 2'-O-methyl-uridine-3'-phosphate
  modified_base 11: mod_base = OTHER; note = 2'-O-methyl-adenosine-3'-phosphate
  modified_base 12: mod_base = OTHER; note = 2'-O-methyl-cytidine-3'-phosphate
  modified_base 13: mod_base = OTHER; note = 2'-O-methyl-adenosine-3'-phosphate
  modified_base 14: mod_base = OTHER; note = 2'-deoxy-2'-fluoro-adenosine-3'-phosphate
  modified_base 15: mod_base = OTHER; note = 2'-O-methyl-guanosine-3'-phosphate
  modified_base 16: mod_base = OTHER; note = 2'-deoxy-2'-fluoro-adenosine-3'-phosphate
  modified_base 17: mod_base = OTHER; note = 2'-O-methyl-uridine-3'-phosphate
  modified_base 18: mod_base = OTHER; note = 2'-O-methyl-cytidine-3'-phosphate
  modified_base 19: mod_base = OTHER; note = 2'-O-methyl-cytidine-3'-phosphorothioate
  modified_base 20: mod_base = OTHER; note = 2'-O-methyl-uridine-3'-phosphorothioate
  modified_base 21: mod_base = OTHER; note = 2'-O-methyl-uridine-3'-phosphate
tttcatgtttacaagatcctt

SEQ ID NO: 2519 - RNA, 21 nt, synthetic construct
  source 1..21: mol_type = other RNA
  modified_base 1: mod_base = OTHER; note 5'-vinylphosphonate-2'-O-methyl-uridine-3'-phosphorothioate
  modified_base 2: mod_base = OTHER; note = 2'-deoxy-2'-fluoro-uridine-3'-phosphorothioate
  modified_base 3: mod_base = OTHER; note = 2'-O-methyl-adenosine-3'-phosphate
  modified_base 4: mod_base = OTHER; note = 2'-O-methyl-adenosine-3'-phosphate
  modified_base 5: mod_base = OTHER; note = 2'-O-methyl-guanosine-3'-phosphate
  modified_base 6: mod_base = OTHER; note = 2'-deoxy-2'-fluoro-cytidine-3'-phosphate
  modified_base 7: mod_base = OTHER; note = 2'-O-methyl-uridine-3'-phosphate
  modified_base 8: mod_base = OTHER; note = 2'-deoxy-2'-fluoro-guanosine-3'-phosphate
  modified_base 9: mod_base = OTHER; note = 2'-deoxy-2'-fluoro-adenosine-3'-phosphate
  modified_base 10: mod_base = OTHER; note = 2'-O-methyl-uridine-3'-phosphate
  modified_base 11: mod_base = OTHER; note = 2'-O-methyl-guanosine-3'-phosphate
  modified_base 12: mod_base = OTHER; note = 2'-O-methyl-uridine-3'-phosphate
  modified_base 13: mod_base = OTHER; note = 2'-O-methyl-guanosine-3'-phosphate
  modified_base 14: mod_base = OTHER; note = 2'-deoxy-2'-fluoro-guanosine-3'-phosphate
  modified_base 15: mod_base = OTHER; note = 2'-O-methyl-cytidine-3'-phosphate
  modified_base 16: mod_base = OTHER; note = 2'-deoxy-2'-fluoro-adenosine-3'-phosphate
  modified_base 17: mod_base = OTHER; note = 2'-O-methyl-adenosine-3'-phosphate
  modified_base 18: mod_base = OTHER; note = 2'-O-methyl-guanosine-3'-phosphate
  modified_base 19: mod_base = OTHER; note = 2'-O-methyl-cytidine-3'-phosphorothioate
  modified_base 20: mod_base = OTHER; note = 2'-O-methyl-uridine-3'-phosphorothioate
  modified_base 21: mod_base = OTHER; note = 2'-O-methyl-uridine-3'-phosphate
ttaagctgatgtggcaagctt

SEQ ID NO: 2520 - RNA, 21 nt, synthetic construct
  source 1..21: mol_type = other RNA
  modified_base 1: mod_base = OTHER; note 5'-vinylphosphonate-2'-O-methyl-uridine-3'-phosphorothioate
  modified_base 2: mod_base = OTHER; note = 2'-deoxy-2'-fluoro-uridine-3'-phosphorothioate
  modified_base 3: mod_base = OTHER; note = 2'-O-methyl-uridine-3'-phosphate
  modified_base 4: mod_base = OTHER; note = 2'-O-methyl-adenosine-3'-phosphate
  modified_base 5: mod_base = OTHER; note = 2'-O-methyl-adenosine-3'-phosphate
  modified_base 6: mod_base = OTHER; note = 2'-deoxy-2'-fluoro-guanosine-3'-phosphate
  modified_base 7: mod_base = OTHER; note = 2'-O-methyl-cytidine-3'-phosphate
  modified_base 8: mod_base = OTHER; note = 2'-deoxy-2'-fluoro-uridine-3'-phosphate
  modified_base 9: mod_base = OTHER; note = 2'-deoxy-2'-fluoro-guanosine-3'-phosphate
  modified_base 10: mod_base = OTHER; note = 2'-O-methyl-adenosine-3'-phosphate
  modified_base 11: mod_base = OTHER; note = 2'-O-methyl-uridine-3'-phosphate
  modified_base 12: mod_base = OTHER; note = 2'-O-methyl-guanosine-3'-phosphate
  modified_base 13: mod_base = OTHER; note = 2'-O-methyl-uridine-3'-phosphate
  modified_base 14: mod_base = OTHER; note = 2'-deoxy-2'-fluoro-guanosine-3'-phosphate
  modified_base 15: mod_base = OTHER; note = 2'-O-methyl-guanosine-3'-phosphate
  modified_base 16: mod_base = OTHER; note = 2'-deoxy-2'-fluoro-cytidine-3'-phosphate
  modified_base 17: mod_base = OTHER; note = 2'-O-methyl-adenosine-3'-phosphate
  modified_base 18: mod_base = OTHER; note = 2'-O-methyl-adenosine-3'-phosphate
  modified_base 19: mod_base = OTHER; note = 2'-O-methyl-guanosine-3'-phosphorothioate
  modified_base 20: mod_base = OTHER; note = 2'-O-methyl-uridine-3'-phosphorothioate
  modified_base 21: mod_base = OTHER; note = 2'-O-methyl-uridine-3'-phosphate
tttaagctgatgtggcaagtt

SEQ ID NO: 2521 - RNA, 21 nt, synthetic construct
  source 1..21: mol_type = other RNA
  modified_base 1: mod_base = OTHER; note 5'-vinylphosphonate-2'-O-methyl-uridine-3'-phosphorothioate
  modified_base 2: mod_base = OTHER; note = 2'-deoxy-2'-fluoro-uridine-3'-phosphorothioate
  modified_base 3: mod_base = OTHER; note = 2'-O-methyl-uridine-3'-phosphate
  modified_base 4: mod_base = OTHER; note = 2'-O-methyl-uridine-3'-phosphate
  modified_base 5: mod_base = OTHER; note = 2'-O-methyl-adenosine-3'-phosphate
  modified_base 6: mod_base = OTHER; note = 2'-deoxy-2'-fluoro-adenosine-3'-phosphate
  modified_base 7: mod_base = OTHER; note = 2'-O-methyl-guanosine-3'-phosphate
  modified_base 8: mod_base = OTHER; note = 2'-deoxy-2'-fluoro-cytidine-3'-phosphate
  modified_base 9: mod_base = OTHER; note = 2'-deoxy-2'-fluoro-uridine-3'-phosphate
  modified_base 10: mod_base = OTHER; note = 2'-O-methyl-guanosine-3'-phosphate
  modified_base 11: mod_base = OTHER; note = 2'-O-methyl-adenosine-3'-phosphate
  modified_base 12: mod_base = OTHER; note = 2'-O-methyl-uridine-3'-phosphate
  modified_base 13: mod_base = OTHER; note = 2'-O-methyl-guanosine-3'-phosphate
  modified_base 14: mod_base = OTHER; note = 2'-deoxy-2'-fluoro-uridine-3'-phosphate
  modified_base 15: mod_base = OTHER; note = 2'-O-methyl-guanosine-3'-phosphate
  modified_base 16: mod_base = OTHER; note = 2'-deoxy-2'-fluoro-guanosine-3'-phosphate
  modified_base 17: mod_base = OTHER; note = 2'-O-methyl-cytidine-3'-phosphate
  modified_base 18: mod_base = OTHER; note = 2'-O-methyl-adenosine-3'-phosphate
  modified_base 19: mod_base = OTHER; note = 2'-O-methyl-adenosine-3'-phosphorothioate
  modified_base 20: mod_base = OTHER; note = 2'-O-methyl-uridine-3'-phosphorothioate
  modified_base 21: mod_base = OTHER; note = 2'-O-methyl-uridine-3'-phosphate
ttttaagctgatgtggcaatt

SEQ ID NO: 2522 - RNA, 21 nt, synthetic construct
  source 1..21: mol_type = other RNA
  modified_base 1: mod_base = OTHER; note 5'-vinylphosphonate-2'-O-methyl-uridine-3'-phosphorothioate
  modified_base 2: mod_base = OTHER; note = 2'-deoxy-2'-fluoro-uridine-3'-phosphorothioate
  modified_base 3: mod_base = OTHER; note = 2'-O-methyl-adenosine-3'-phosphate
  modified_base 4: mod_base = OTHER; note = 2'-O-methyl-adenosine-3'-phosphate
  modified_base 5: mod_base = OTHER; note = 2'-O-methyl-uridine-3'-phosphate
  modified_base 6: mod_base = OTHER; note = 2'-deoxy-2'-fluoro-cytidine-3'-phosphate
  modified_base 7: mod_base = OTHER; note = 2'-O-methyl-uridine-3'-phosphate
  modified_base 8: mod_base = OTHER; note = 2'-deoxy-2'-fluoro-uridine-3'-phosphate
  modified_base 9: mod_base = OTHER; note = 2'-deoxy-2'-fluoro-guanosine-3'-phosphate
  modified_base 10: mod_base = OTHER; note = 2'-O-methyl-adenosine-3'-phosphate
  modified_base 11: mod_base = OTHER; note = 2'-O-methyl-cytidine-3'-phosphate
  modified_base 12: mod_base = OTHER; note = 2'-O-methyl-cytidine-3'-phosphate
  modified_base 13: mod_base = OTHER; note = 2'-O-methyl-uridine-3'-phosphate
  modified_base 14: mod_base = OTHER; note = 2'-deoxy-2'-fluoro-uridine-3'-phosphate
  modified_base 15: mod_base = OTHER; note = 2'-O-methyl-uridine-3'-phosphate
  modified_base 16: mod_base = OTHER; note = 2'-deoxy-2'-fluoro-uridine-3'-phosphate
  modified_base 17: mod_base = OTHER; note = 2'-O-methyl-cytidine-3'-phosphate
  modified_base 18: mod_base = OTHER; note = 2'-O-methyl-adenosine-3'-phosphate
  modified_base 19: mod_base = OTHER; note = 2'-O-methyl-cytidine-3'-phosphorothioate
  modified_base 20: mod_base = OTHER; note = 2'-O-methyl-uridine-3'-phosphorothioate
  modified_base 21: mod_base = OTHER; note = 2'-O-methyl-uridine-3'-phosphate
ttaatcttgaccttttcactt

SEQ ID NO: 2523 - RNA, 2989 nt, Homo sapiens
  source 1..2989: mol_type = genomic RNA
ataaactgggtgacagagtcagaaaactccccagctaaacacccgtaagacttcatacaacacaatactctatactgtgatgatcacagctgccaaggctacctaaaagaagacagttatctcatatttggctgccagctttttatctttctctcgaccacttaaaacttcagacttcctgtcctgctggtatcatggagaaagtccaatacctcactcgctcagctataagaagagcctcaaccattgaaatgcctcaacaagcacgtcaaaagctacagaatctatttatcaatttctgtctcatcttaatatgtctcttgctgatctgtatcatcgtgatgcttctctgaagttctgctacaacctctagatctgcagcttgccacatcagcttaaaatctgtcatcccatgcagacaggaaaacaatattgtataacagaccacttcctgagtagaagagtttctttgtgaaaaggtcaagattaagactaaaacttattgttaccatatgtattcatctgttggatcttgtaaacatgaaaagggctttattttcaaaaattaacttcaaaataagtgtataaaatgcaactgttgatttcctcaacatggctcacaaatttctatcccaaatcttttctgaagatgaagagtttagttttaaaactgcactgccaacaagttcacttcatatataaagcattatttttactcttttgaggtgaatataatttatattacaatgtaaaagcttctttaatactaagtatttttcaggtcttcaccaagtatcaaagtaataacacaaatgaagtgtcattattcaaaatagtccactgactcctcacatctgttatcttattataaagaactatttgtagtaactatcagaatctacattctaaaacagaaattgtattttttctatgccacattaacatcttttaaagttgatgagaatcaagtatggaaaagtaaggccatactcttacataataaaattccttttaagtaattttttcaaagaatcacagaattctagtacatgtaggtaaatcataaatctgttctaagacatatgatcaacagatgagaactggtggttaatatgtgacagtgagattagtcatatcactaatatactaacaacagaatctaatcttcatttaaggcactgtagtgaattatctgagctagagttacctagcttaccatactatatctttggaatcatgaaaccttaagacttcagaatgattttgcaggttgtcttccattccagcctaacatccaatgcaggcaaggaaaataaaagatttccagtgacagaaaaatatattatctcaagtattttttaaaaatatatgaattctctctccaaatattaactaattattagattatattttgaaatgaacttgttggcccatctattacatctacagctgacccttgaacatgggggttaggggagctgacaattcgtgggtccgcaaaatcttaactacctaatagcctactattgaccataaaccttactgataacataaacagtaaattaacacatattttgcgtgttatatgtattatacactatattcctacaataaagtaagctagagaaaatgttatttagaaaatcataagaaagagaaaatatatttactattcattaaatggaagtgggtcaacataaaagtcttcattctcattgtcttcacattgagtaggcagaggaggagaaagatggggaggaagagaaggcgttggtcttgcagtcttgtcttaggggtgtggggagtgggggaaagaatattcatgtataagtggacccttgcaattcaagcccttgttgttcaagggtcaactgtaataggatatagctatttttcttcctctatcaaccaaatggtaagcatctattttgcagtccactctactgagctaaattatagatccagctatgctatttataattattttcttgatgaataaattttcaatttctcctctgaccatttcagaacatcttccaataactcataaaacaactgaagtaaaattgagtgctggaaaatatattcaccaaactttggtaatttaagttgactaaagtttaaaattaagtctaaaatagtttacacctatactgcataatccaacaattttaatttcagttgaagacatgttactaatataactattattaaaagagtagaggatgtgtaattaaccatatcttctaaaacatggttactaaaagaatatgtaacatcaatattgaccttggtttcttacacaagtgttgctaactcaatagtgaaggagacactattaaattttctgaacccatgagagatactagagatggggagtggaaagtgtttggttcagggatatctgaagaacagaagggcagagatttcttaagtgacgcctcatctacaagctggaaattcctaaaaacaagtagaaagcttataaacaacaggtgatacactcacctcactggttttagtaaattaccaatacagaaagtatccctagtcttaaaaacaagtggaaaatttgaactgattagtcatattcctttgattacactgtttgttacaatatttttctcagtaaacagaaataactaatttttttgttcttcattctttgatagaaattaaaatcttattctgtgaggattacagaatactataactcaaattataaagtagaataaactctttaaataattattcttcatcataaagtgtaaagaataagatataagaaaacaatttatttttaaaatttaatatactaaatgctcaaatatgttctactatagaataagttcttatcttaatttacagggcactaaaaacaattttaaaatgcttaatgttgccttttatattttaattggttaagaatatatatttgtttaatgcaaatcagaatcactatattaaaatgaatgttcttgaaaactca

SEQ ID NO: 2524 - RNA, 19 nt, synthetic construct
  source 1..19: mol_type = other RNA
aagtccaatacctcactcg

SEQ ID NO: 2525 - RNA, 19 nt, synthetic construct
  source 1..19: mol_type = other RNA
tagcttaccatactatatc

SEQ ID NO: 2526 - RNA, 19 nt, synthetic construct
  source 1..19: mol_type = other RNA
gcttaccatactatatctt

SEQ ID NO: 2527 - RNA, 19 nt, synthetic construct
  source 1..19: mol_type = other RNA
gacaattcgtgggtccgca

SEQ ID NO: 2528 - RNA, 19 nt, synthetic construct
  source 1..19: mol_type = other RNA
agatttcttaagtgacgcc

SEQ ID NO: 2529 - RNA, 19 nt, synthetic construct
  source 1..19: mol_type = other RNA
cttaagtgacgcctcatct

SEQ ID NO: 2530 - RNA, 19 nt, synthetic construct
  source 1..19: mol_type = other RNA
cccgtaagacttcatacaa

SEQ ID NO: 2531 - RNA, 19 nt, synthetic construct
  source 1..19: mol_type = other RNA
cgctcagctataagaagag

SEQ ID NO: 2532 - RNA, 19 nt, synthetic construct
  source 1..19: mol_type = other RNA
ctgtatcatcgtgatgctt

SEQ ID NO: 2533 - RNA, 19 nt, synthetic construct
  source 1..19: mol_type = other RNA
tgtatcatcgtgatgcttc

SEQ ID NO: 2534 - RNA, 19 nt, synthetic construct
  source 1..19: mol_type = other RNA
gtcatatcactaatatact

SEQ ID NO: 2535 - RNA, 19 nt, synthetic construct
  source 1..19: mol_type = other RNA
agttacctagcttaccata

SEQ ID NO: 2536 - RNA, 19 nt, synthetic construct
  source 1..19: mol_type = other RNA
tcttaactacctaatagcc

SEQ ID NO: 2537 - RNA, 19 nt, synthetic construct
  source 1..19: mol_type = other RNA
cttaactacctaatagcct

SEQ ID NO: 2538 - RNA, 19 nt, synthetic construct
  source 1..19: mol_type = other RNA
ctctatcaaccaaatggta

SEQ ID NO: 2539 - RNA, 19 nt, synthetic construct
  source 1..19: mol_type = other RNA
caaccaaatggtaagcatc

SEQ ID NO: 2540 - RNA, 19 nt, synthetic construct
  source 1..19: mol_type = other RNA
ctctactgagctaaattat

SEQ ID NO: 2541 - RNA, 19 nt, synthetic construct
  source 1..19: mol_type = other RNA
tctactgagctaaattata

SEQ ID NO: 2542 - RNA, 19 nt, synthetic construct
  source 1..19: mol_type = other RNA
gctaaattatagatccagc

SEQ ID NO: 2543 - RNA, 19 nt, synthetic construct
  source 1..19: mol_type = other RNA
acacaagtgttgctaactc

SEQ ID NO: 2544 - RNA, 19 nt, synthetic construct
  source 1..19: mol_type = other RNA
gttgctaactcaatagtga

SEQ ID NO: 2545 - RNA, 19 nt, synthetic construct
  source 1..19: mol_type = other RNA
gatttcttaagtgacgcct

SEQ ID NO: 2546 - RNA, 19 nt, synthetic construct
  source 1..19: mol_type = other RNA
tcttaagtgacgcctcatc

SEQ ID NO: 2547 - RNA, 19 nt, synthetic construct
  source 1..19: mol_type = other RNA
ttaagtgacgcctcatcta

SEQ ID NO: 2548 - RNA, 19 nt, synthetic construct
  source 1..19: mol_type = other RNA
ctataagaagagcctcaac

SEQ ID NO: 2549 - RNA, 19 nt, synthetic construct
  source 1..19: mol_type = other RNA
tataagaagagcctcaacc

SEQ ID NO: 2550 - RNA, 19 nt, synthetic construct
  source 1..19: mol_type = other RNA
ataagaagagcctcaacca

SEQ ID NO: 2551 - RNA, 19 nt, synthetic construct
  source 1..19: mol_type = other RNA
acaagcacgtcaaaagcta

SEQ ID NO: 2552 - RNA, 19 nt, synthetic construct
  source 1..19: mol_type = other RNA
ctacagaatctatttatca

SEQ ID NO: 2553 - RNA, 19 nt, synthetic construct
  source 1..19: mol_type = other RNA
aaaactgcactgccaacaa

SEQ ID NO: 2554 - RNA, 19 nt, synthetic construct
  source 1..19: mol_type = other RNA
aaactgcactgccaacaag

SEQ ID NO: 2555 - RNA, 19 nt, synthetic construct
  source 1..19: mol_type = other RNA
tgagaatcaagtatggaaa

SEQ ID NO: 2556 - RNA, 19 nt, synthetic construct
  source 1..19: mol_type = other RNA
aactggtggttaatatgtg

SEQ ID NO: 2557 - RNA, 19 nt, synthetic construct
  source 1..19: mol_type = other RNA
actggtggttaatatgtga

SEQ ID NO: 2558 - RNA, 19 nt, synthetic construct
  source 1..19: mol_type = other RNA
attatacactatattccta

SEQ ID NO: 2559 - RNA, 19 nt, synthetic construct
  source 1..19: mol_type = other RNA
gtaaattaccaatacagaa

SEQ ID NO: 2560 - RNA, 19 nt, synthetic construct
  source 1..19: mol_type = other RNA
aactgattagtcatattcc

SEQ ID NO: 2561 - RNA, 19 nt, synthetic construct
  source 1..19: mol_type = other RNA
actatagaataagttctta

SEQ ID NO: 2562 - RNA, 19 nt, synthetic construct
  source 1..19: mol_type = other RNA
gctataagaagagcctcaa

SEQ ID NO: 2563 - RNA, 19 nt, synthetic construct
  source 1..19: mol_type = other RNA
aaaggtcaagattaagact

SEQ ID NO: 2564 - RNA, 19 nt, synthetic construct
  source 1..19: mol_type = other RNA
aaggtcaagattaagacta

SEQ ID NO: 2565 - RNA, 19 nt, synthetic construct
  source 1..19: mol_type = other RNA
agattaagactaaaactta

SEQ ID NO: 2566 - RNA, 19 nt, synthetic construct
  source 1..19: mol_type = other RNA
acaaatgaagtgtcattat

SEQ ID NO: 2567 - RNA, 19 nt, synthetic construct
  source 1..19: mol_type = other RNA
ctcacaaatttctatccca

SEQ ID NO: 2568 - RNA, 19 nt, synthetic construct
  source 1..19: mol_type = other RNA
taaaactgcactgccaaca

SEQ ID NO: 2569 - RNA, 19 nt, synthetic construct
  source 1..19: mol_type = other RNA
aactgcactgccaacaagt

SEQ ID NO: 2570 - RNA, 19 nt, synthetic construct
  source 1..19: mol_type = other RNA
agctacagaatctatttat

SEQ ID NO: 2571 - RNA, 19 nt, synthetic construct
  source 1..19: mol_type = other RNA
gctacagaatctatttatc

SEQ ID NO: 2572 - RNA, 19 nt, synthetic construct
  source 1..19: mol_type = other RNA
aaaacttattgttaccata

SEQ ID NO: 2573 - RNA, 19 nt, synthetic construct
  source 1..19: mol_type = other RNA
gaactggtggttaatatgt

SEQ ID NO: 2574 - RNA, 19 nt, synthetic construct
  source 1..19: mol_type = other RNA
aactggtggttaatatgtg

SEQ ID NO: 2575 - RNA, 19 nt, synthetic construct
  source 1..19: mol_type = other RNA
actggtggttaatatgtga

SEQ ID NO: 2576 - RNA, 19 nt, synthetic construct
  source 1..19: mol_type = other RNA
ctggtggttaatatgtgac

SEQ ID NO: 2577 - RNA, 19 nt, synthetic construct
  source 1..19: mol_type = other RNA
attcgtgggtccgcaaaat

SEQ ID NO: 2578 - RNA, 19 nt, synthetic construct
  source 1..19: mol_type = other RNA
atattcctacaataaagta

SEQ ID NO: 2579 - RNA, 19 nt, synthetic construct
  source 1..19: mol_type = other RNA
aataggatatagctatttt

SEQ ID NO: 2580 - RNA, 19 nt, synthetic construct
  source 1..19: mol_type = other RNA
agtccactctactgagcta

SEQ ID NO: 2581 - RNA, 19 nt, synthetic construct
  source 1..19: mol_type = other RNA
ataatccaacaattttaat

SEQ ID NO: 2582 - RNA, 19 nt, synthetic construct
  source 1..19: mol_type = other RNA
atatgtaacatcaatattg

SEQ ID NO: 2583 - RNA, 19 nt, synthetic construct
  source 1..19: mol_type = other RNA
tgaacccatgagagatact

SEQ ID NO: 2584 - RNA, 19 nt, synthetic construct
  source 1..19: mol_type = other RNA
tcttaatttacagggcact

SEQ ID NO: 2585 - RNA, 19 nt, synthetic construct
  source 1..19: mol_type = other RNA
cttaatttacagggcacta

SEQ ID NO: 2586 - RNA, 19 nt, synthetic construct
  source 1..19: mol_type = other RNA
acagaatctatttatcaat

SEQ ID NO: 2587 - RNA, 19 nt, synthetic construct
  source 1..19: mol_type = other RNA
tgaggattacagaatacta

SEQ ID NO: 2588 - RNA, 19 nt, synthetic construct
  source 1..19: mol_type = other RNA
ttctttaatactaagtatt

SEQ ID NO: 2589 - RNA, 19 nt, synthetic construct
  source 1..19: mol_type = other RNA
tctccaaatattaactaat

SEQ ID NO: 2590 - RNA, 19 nt, synthetic construct
  source 1..19: mol_type = other RNA
tagaggatgtgtaattaac

SEQ ID NO: 2591 - RNA, 19 nt, synthetic construct
  source 1..19: mol_type = other RNA
aatttaagttgactaaagt

SEQ ID NO: 2592 - RNA, 19 nt, synthetic construct
  source 1..19: mol_type = other RNA
tgtgaggattacagaatac

SEQ ID NO: 2593 - RNA, 19 nt, synthetic construct
  source 1..19: mol_type = other RNA
ttcatacaacacaatactc

SEQ ID NO: 2594 - RNA, 19 nt, synthetic construct
  source 1..19: mol_type = other RNA
ctccaaatattaactaatt

SEQ ID NO: 2595 - RNA, 19 nt, synthetic construct
  source 1..19: mol_type = other RNA
catatcactaatatactaa

SEQ ID NO: 2596 - RNA, 19 nt, synthetic construct
  source 1..19: mol_type = other RNA
attagtcatatcactaata

SEQ ID NO: 2597 - RNA, 19 nt, synthetic construct
  source 1..19: mol_type = other RNA
gaatctatttatcaatttc

SEQ ID NO: 2598 - RNA, 19 nt, synthetic construct
  source 1..19: mol_type = other RNA
aattaaccatatcttctaa

SEQ ID NO: 2599 - RNA, 19 nt, synthetic construct
  source 1..19: mol_type = other RNA
gtagaggatgtgtaattaa

SEQ ID NO: 2600 - RNA, 19 nt, synthetic construct
  source 1..19: mol_type = other RNA
agaaagtccaatacctcac

SEQ ID NO: 2601 - RNA, 19 nt, synthetic construct
  source 1..19: mol_type = other RNA
aactttggtaatttaagtt

SEQ ID NO: 2602 - RNA, 19 nt, synthetic construct
  source 1..19: mol_type = other RNA
ctctccaaatattaactaa

SEQ ID NO: 2603 - RNA, 19 nt, synthetic construct
  source 1..19: mol_type = other RNA
atagaataagttcttatct

SEQ ID NO: 2604 - RNA, 19 nt, synthetic construct
  source 1..19: mol_type = other RNA
tatcactaatatactaaca

SEQ ID NO: 2605 - RNA, 19 nt, synthetic construct
  source 1..19: mol_type = other RNA
gaggatgtgtaattaacca

SEQ ID NO: 2606 - RNA, 19 nt, synthetic construct
  source 1..19: mol_type = other RNA
gaatactataactcaaatt

SEQ ID NO: 2607 - RNA, 19 nt, synthetic construct
  source 1..19: mol_type = other RNA
ctgctacaacctctagatc

SEQ ID NO: 2608 - RNA, 19 nt, synthetic construct
  source 1..19: mol_type = other RNA
ctatttatcaatttctgtc

SEQ ID NO: 2609 - RNA, 19 nt, synthetic construct
  source 1..19: mol_type = other RNA
gaagacatgttactaatat

SEQ ID NO: 2610 - RNA, 19 nt, synthetic construct
  source 1..19: mol_type = other RNA
tctctccaaatattaacta

SEQ ID NO: 2611 - RNA, 19 nt, synthetic construct
  source 1..19: mol_type = other RNA
tgctacaacctctagatct

SEQ ID NO: 2612 - RNA, 19 nt, synthetic construct
  source 1..19: mol_type = other RNA
catggagaaagtccaatac

SEQ ID NO: 2613 - RNA, 19 nt, synthetic construct
  source 1..19: mol_type = other RNA
actatcagaatctacattc

SEQ ID NO: 2614 - RNA, 19 nt, synthetic construct
  source 1..19: mol_type = other RNA
tcatggagaaagtccaata

SEQ ID NO: 2615 - RNA, 19 nt, synthetic construct
  source 1..19: mol_type = other RNA
gttatctcatatttggcta

SEQ ID NO: 2616 - RNA, 19 nt, synthetic construct
  source 1..19: mol_type = other RNA
caagcacgtcaaaagctaa

SEQ ID NO: 2617 - RNA, 19 nt, synthetic construct
  source 1..19: mol_type = other RNA
agcacgtcaaaagctacaa

SEQ ID NO: 2618 - RNA, 19 nt, synthetic construct
  source 1..19: mol_type = other RNA
cgtcaaaagctacagaata

SEQ ID NO: 2619 - RNA, 19 nt, synthetic construct
  source 1..19: mol_type = other RNA
gtcaaaagctacagaatca

SEQ ID NO: 2620 - RNA, 19 nt, synthetic construct
  source 1..19: mol_type = other RNA
tgtaaacatgaaaagggca

SEQ ID NO: 2621 - RNA, 19 nt, synthetic construct
  source 1..19: mol_type = other RNA
gtaaacatgaaaagggcta

SEQ ID NO: 2622 - RNA, 19 nt, synthetic construct
  source 1..19: mol_type = other RNA
aacagatgagaactggtga

SEQ ID NO: 2623 - RNA, 19 nt, synthetic construct
  source 1..19: mol_type = other RNA
acagatgagaactggtgga

SEQ ID NO: 2624 - RNA, 19 nt, synthetic construct
  source 1..19: mol_type = other RNA
cagatgagaactggtggta

SEQ ID NO: 2625 - RNA, 19 nt, synthetic construct
  source 1..19: mol_type = other RNA
agatgagaactggtggtta

SEQ ID NO: 2626 - RNA, 19 nt, synthetic construct
  source 1..19: mol_type = other RNA
gatgagaactggtggttaa

SEQ ID NO: 2627 - RNA, 19 nt, synthetic construct
  source 1..19: mol_type = other RNA
atgagaactggtggttaaa

SEQ ID NO: 2628 - RNA, 19 nt, synthetic construct
  source 1..19: mol_type = other RNA
tgagaactggtggttaata

SEQ ID NO: 2629 - RNA, 19 nt, synthetic construct
  source 1..19: mol_type = other RNA
gagaactggtggttaataa

SEQ ID NO: 2630 - RNA, 19 nt, synthetic construct
  source 1..19: mol_type = other RNA
agaactggtggttaatata

SEQ ID NO: 2631 - RNA, 19 nt, synthetic construct
  source 1..19: mol_type = other RNA
tttggaatcatgaaaccta

SEQ ID NO: 2632 - RNA, 19 nt, synthetic construct
  source 1..19: mol_type = other RNA
ttggaatcatgaaacctta

SEQ ID NO: 2633 - RNA, 19 nt, synthetic construct
  source 1..19: mol_type = other RNA
aagtaagctagagaaaata

SEQ ID NO: 2634 - RNA, 19 nt, synthetic construct
  source 1..19: mol_type = other RNA
agtaagctagagaaaatga

SEQ ID NO: 2635 - RNA, 19 nt, synthetic construct
  source 1..19: mol_type = other RNA
gtaagctagagaaaatgta

SEQ ID NO: 2636 - RNA, 19 nt, synthetic construct
  source 1..19: mol_type = other RNA
ttcattaaatggaagtgga

SEQ ID NO: 2637 - RNA, 19 nt, synthetic construct
  source 1..19: mol_type = other RNA
aagtcttcattctcattga

SEQ ID NO: 2638 - RNA, 19 nt, synthetic construct
  source 1..19: mol_type = other RNA
agtcttcattctcattgta

SEQ ID NO: 2639 - RNA, 19 nt, synthetic construct
  source 1..19: mol_type = other RNA
gtcttcattctcattgtca

SEQ ID NO: 2640 - RNA, 19 nt, synthetic construct
  source 1..19: mol_type = other RNA
tcttcattctcattgtcta

SEQ ID NO: 2641 - RNA, 19 nt, synthetic construct
  source 1..19: mol_type = other RNA
cttgtcttaggggtgtgga

SEQ ID NO: 2642 - RNA, 19 nt, synthetic construct
  source 1..19: mol_type = other RNA
tattcatgtataagtggaa

SEQ ID NO: 2643 - RNA, 19 nt, synthetic construct
  source 1..19: mol_type = other RNA
tcatgtataagtggaccca

SEQ ID NO: 2644 - RNA, 19 nt, synthetic construct
  source 1..19: mol_type = other RNA
cgagtgaggtattggactt

SEQ ID NO: 2645 - RNA, 19 nt, synthetic construct
  source 1..19: mol_type = other RNA
gatatagtatggtaagcta

SEQ ID NO: 2646 - RNA, 19 nt, synthetic construct
  source 1..19: mol_type = other RNA
aagatatagtatggtaagc

SEQ ID NO: 2647 - RNA, 19 nt, synthetic construct
  source 1..19: mol_type = other RNA
tgcggacccacgaattgtc

SEQ ID NO: 2648 - RNA, 19 nt, synthetic construct
  source 1..19: mol_type = other RNA
ggcgtcacttaagaaatct

SEQ ID NO: 2649 - RNA, 19 nt, synthetic construct
  source 1..19: mol_type = other RNA
agatgaggcgtcacttaag

SEQ ID NO: 2650 - RNA, 19 nt, synthetic construct
  source 1..19: mol_type = other RNA
ttgtatgaagtcttacggg

SEQ ID NO: 2651 - RNA, 19 nt, synthetic construct
  source 1..19: mol_type = other RNA
ctcttcttatagctgagcg

SEQ ID NO: 2652 - RNA, 19 nt, synthetic construct
  source 1..19: mol_type = other RNA
aagcatcacgatgatacag

SEQ ID NO: 2653 - RNA, 19 nt, synthetic construct
  source 1..19: mol_type = other RNA
gaagcatcacgatgataca

SEQ ID NO: 2654 - RNA, 19 nt, synthetic construct
  source 1..19: mol_type = other RNA
agtatattagtgatatgac

SEQ ID NO: 2655 - RNA, 19 nt, synthetic construct
  source 1..19: mol_type = other RNA
tatggtaagctaggtaact

SEQ ID NO: 2656 - RNA, 19 nt, synthetic construct
  source 1..19: mol_type = other RNA
ggctattaggtagttaaga

SEQ ID NO: 2657 - RNA, 19 nt, synthetic construct
  source 1..19: mol_type = other RNA
aggctattaggtagttaag

SEQ ID NO: 2658 - RNA, 19 nt, synthetic construct
  source 1..19: mol_type = other RNA
taccatttggttgatagag

SEQ ID NO: 2659 - RNA, 19 nt, synthetic construct
  source 1..19: mol_type = other RNA
gatgcttaccatttggttg

SEQ ID NO: 2660 - RNA, 19 nt, synthetic construct
  source 1..19: mol_type = other RNA
ataatttagctcagtagag

SEQ ID NO: 2661 - RNA, 19 nt, synthetic construct
  source 1..19: mol_type = other RNA
tataatttagctcagtaga

SEQ ID NO: 2662 - RNA, 19 nt, synthetic construct
  source 1..19: mol_type = other RNA
gctggatctataatttagc

SEQ ID NO: 2663 - RNA, 19 nt, synthetic construct
  source 1..19: mol_type = other RNA
gagttagcaacacttgtgt

SEQ ID NO: 2664 - RNA, 19 nt, synthetic construct
  source 1..19: mol_type = other RNA
tcactattgagttagcaac

SEQ ID NO: 2665 - RNA, 19 nt, synthetic construct
  source 1..19: mol_type = other RNA
aggcgtcacttaagaaatc

SEQ ID NO: 2666 - RNA, 19 nt, synthetic construct
  source 1..19: mol_type = other RNA
gatgaggcgtcacttaaga

SEQ ID NO: 2667 - RNA, 19 nt, synthetic construct
  source 1..19: mol_type = other RNA
tagatgaggcgtcacttaa

SEQ ID NO: 2668 - RNA, 19 nt, synthetic construct
  source 1..19: mol_type = other RNA
gttgaggctcttcttatag

SEQ ID NO: 2669 - RNA, 19 nt, synthetic construct
  source 1..19: mol_type = other RNA
ggttgaggctcttcttata

SEQ ID NO: 2670 - RNA, 19 nt, synthetic construct
  source 1..19: mol_type = other RNA
tggttgaggctcttcttat

SEQ ID NO: 2671 - RNA, 19 nt, synthetic construct
  source 1..19: mol_type = other RNA
tagcttttgacgtgcttgt

SEQ ID NO: 2672 - RNA, 19 nt, synthetic construct
  source 1..19: mol_type = other RNA
tgataaatagattctgtag

SEQ ID NO: 2673 - RNA, 19 nt, synthetic construct
  source 1..19: mol_type = other RNA
ttgttggcagtgcagtttt

SEQ ID NO: 2674 - RNA, 19 nt, synthetic construct
  source 1..19: mol_type = other RNA
cttgttggcagtgcagttt

SEQ ID NO: 2675 - RNA, 19 nt, synthetic construct
  source 1..19: mol_type = other RNA
tttccatacttgattctca

SEQ ID NO: 2676 - RNA, 19 nt, synthetic construct
  source 1..19: mol_type = other RNA
cacatattaaccaccagtt

SEQ ID NO: 2677 - RNA, 19 nt, synthetic construct
  source 1..19: mol_type = other RNA
tcacatattaaccaccagt

SEQ ID NO: 2678 - RNA, 19 nt, synthetic construct
  source 1..19: mol_type = other RNA
taggaatatagtgtataat

SEQ ID NO: 2679 - RNA, 19 nt, synthetic construct
  source 1..19: mol_type = other RNA
ttctgtattggtaatttac

SEQ ID NO: 2680 - RNA, 19 nt, synthetic construct
  source 1..19: mol_type = other RNA
ggaatatgactaatcagtt

SEQ ID NO: 2681 - RNA, 19 nt, synthetic construct
  source 1..19: mol_type = other RNA
taagaacttattctatagt

SEQ ID NO: 2682 - RNA, 19 nt, synthetic construct
  source 1..19: mol_type = other RNA
ttgaggctcttcttatagc

SEQ ID NO: 2683 - RNA, 19 nt, synthetic construct
  source 1..19: mol_type = other RNA
agtcttaatcttgaccttt

SEQ ID NO: 2684 - RNA, 19 nt, synthetic construct
  source 1..19: mol_type = other RNA
tagtcttaatcttgacctt

SEQ ID NO: 2685 - RNA, 19 nt, synthetic construct
  source 1..19: mol_type = other RNA
taagttttagtcttaatct

SEQ ID NO: 2686 - RNA, 19 nt, synthetic construct
  source 1..19: mol_type = other RNA
ataatgacacttcatttgt

SEQ ID NO: 2687 - RNA, 19 nt, synthetic construct
  source 1..19: mol_type = other RNA
tgggatagaaatttgtgag

SEQ ID NO: 2688 - RNA, 19 nt, synthetic construct
  source 1..19: mol_type = other RNA
tgttggcagtgcagtttta

SEQ ID NO: 2689 - RNA, 19 nt, synthetic construct
  source 1..19: mol_type = other RNA
acttgttggcagtgcagtt

SEQ ID NO: 2690 - RNA, 19 nt, synthetic construct
  source 1..19: mol_type = other RNA
ataaatagattctgtagct

SEQ ID NO: 2691 - RNA, 19 nt, synthetic construct
  source 1..19: mol_type = other RNA
gataaatagattctgtagc

SEQ ID NO: 2692 - RNA, 19 nt, synthetic construct
  source 1..19: mol_type = other RNA
tatggtaacaataagtttt

SEQ ID NO: 2693 - RNA, 19 nt, synthetic construct
  source 1..19: mol_type = other RNA
acatattaaccaccagttc

SEQ ID NO: 2694 - RNA, 19 nt, synthetic construct
  source 1..19: mol_type = other RNA
cacatattaaccaccagtt

SEQ ID NO: 2695 - RNA, 19 nt, synthetic construct
  source 1..19: mol_type = other RNA
tcacatattaaccaccagt

SEQ ID NO: 2696 - RNA, 19 nt, synthetic construct
  source 1..19: mol_type = other RNA
gtcacatattaaccaccag

SEQ ID NO: 2697 - RNA, 19 nt, synthetic construct
  source 1..19: mol_type = other RNA
attttgcggacccacgaat

SEQ ID NO: 2698 - RNA, 19 nt, synthetic construct
  source 1..19: mol_type = other RNA
tactttattgtaggaatat

SEQ ID NO: 2699 - RNA, 19 nt, synthetic construct
  source 1..19: mol_type = other RNA
aaaatagctatatcctatt

SEQ ID NO: 2700 - RNA, 19 nt, synthetic construct
  source 1..19: mol_type = other RNA
tagctcagtagagtggact

SEQ ID NO: 2701 - RNA, 19 nt, synthetic construct
  source 1..19: mol_type = other RNA
attaaaattgttggattat

SEQ ID NO: 2702 - RNA, 19 nt, synthetic construct
  source 1..19: mol_type = other RNA
caatattgatgttacatat

SEQ ID NO: 2703 - RNA, 19 nt, synthetic construct
  source 1..19: mol_type = other RNA
agtatctctcatgggttca

SEQ ID NO: 2704 - RNA, 19 nt, synthetic construct
  source 1..19: mol_type = other RNA
agtgccctgtaaattaaga

SEQ ID NO: 2705 - RNA, 19 nt, synthetic construct
  source 1..19: mol_type = other RNA
tagtgccctgtaaattaag

SEQ ID NO: 2706 - RNA, 19 nt, synthetic construct
  source 1..19: mol_type = other RNA
attgataaatagattctgt

SEQ ID NO: 2707 - RNA, 19 nt, synthetic construct
  source 1..19: mol_type = other RNA
tagtattctgtaatcctca

SEQ ID NO: 2708 - RNA, 19 nt, synthetic construct
  source 1..19: mol_type = other RNA
aatacttagtattaaagaa

SEQ ID NO: 2709 - RNA, 19 nt, synthetic construct
  source 1..19: mol_type = other RNA
attagttaatatttggaga

SEQ ID NO: 2710 - RNA, 19 nt, synthetic construct
  source 1..19: mol_type = other RNA
gttaattacacatcctcta

SEQ ID NO: 2711 - RNA, 19 nt, synthetic construct
  source 1..19: mol_type = other RNA
actttagtcaacttaaatt

SEQ ID NO: 2712 - RNA, 19 nt, synthetic construct
  source 1..19: mol_type = other RNA
gtattctgtaatcctcaca

SEQ ID NO: 2713 - RNA, 19 nt, synthetic construct
  source 1..19: mol_type = other RNA
gagtattgtgttgtatgaa

SEQ ID NO: 2714 - RNA, 19 nt, synthetic construct
  source 1..19: mol_type = other RNA
aattagttaatatttggag

SEQ ID NO: 2715 - RNA, 19 nt, synthetic construct
  source 1..19: mol_type = other RNA
ttagtatattagtgatatg

SEQ ID NO: 2716 - RNA, 19 nt, synthetic construct
  source 1..19: mol_type = other RNA
tattagtgatatgactaat

SEQ ID NO: 2717 - RNA, 19 nt, synthetic construct
  source 1..19: mol_type = other RNA
gaaattgataaatagattc

SEQ ID NO: 2718 - RNA, 19 nt, synthetic construct
  source 1..19: mol_type = other RNA
ttagaagatatggttaatt

SEQ ID NO: 2719 - RNA, 19 nt, synthetic construct
  source 1..19: mol_type = other RNA
ttaattacacatcctctac

SEQ ID NO: 2720 - RNA, 19 nt, synthetic construct
  source 1..19: mol_type = other RNA
gtgaggtattggactttct

SEQ ID NO: 2721 - RNA, 19 nt, synthetic construct
  source 1..19: mol_type = other RNA
aacttaaattaccaaagtt

SEQ ID NO: 2722 - RNA, 19 nt, synthetic construct
  source 1..19: mol_type = other RNA
ttagttaatatttggagag

SEQ ID NO: 2723 - RNA, 19 nt, synthetic construct
  source 1..19: mol_type = other RNA
agataagaacttattctat

SEQ ID NO: 2724 - RNA, 19 nt, synthetic construct
  source 1..19: mol_type = other RNA
tgttagtatattagtgata

SEQ ID NO: 2725 - RNA, 19 nt, synthetic construct
  source 1..19: mol_type = other RNA
tggttaattacacatcctc

SEQ ID NO: 2726 - RNA, 19 nt, synthetic construct
  source 1..19: mol_type = other RNA
aatttgagttatagtattc

SEQ ID NO: 2727 - RNA, 19 nt, synthetic construct
  source 1..19: mol_type = other RNA
gatctagaggttgtagcag

SEQ ID NO: 2728 - RNA, 19 nt, synthetic construct
  source 1..19: mol_type = other RNA
gacagaaattgataaatag

SEQ ID NO: 2729 - RNA, 19 nt, synthetic construct
  source 1..19: mol_type = other RNA
atattagtaacatgtcttc

SEQ ID NO: 2730 - RNA, 19 nt, synthetic construct
  source 1..19: mol_type = other RNA
tagttaatatttggagaga

SEQ ID NO: 2731 - RNA, 19 nt, synthetic construct
  source 1..19: mol_type = other RNA
agatctagaggttgtagca

SEQ ID NO: 2732 - RNA, 19 nt, synthetic construct
  source 1..19: mol_type = other RNA
gtattggactttctccatg

SEQ ID NO: 2733 - RNA, 19 nt, synthetic construct
  source 1..19: mol_type = other RNA
gaatgtagattctgatagt

SEQ ID NO: 2734 - RNA, 19 nt, synthetic construct
  source 1..19: mol_type = other RNA
tattggactttctccatga

SEQ ID NO: 2735 - RNA, 19 nt, synthetic construct
  source 1..19: mol_type = other RNA
tagccaaatatgagataac

SEQ ID NO: 2736 - RNA, 19 nt, synthetic construct
  source 1..19: mol_type = other RNA
ttagcttttgacgtgcttg

SEQ ID NO: 2737 - RNA, 19 nt, synthetic construct
  source 1..19: mol_type = other RNA
ttgtagcttttgacgtgct

SEQ ID NO: 2738 - RNA, 19 nt, synthetic construct
  source 1..19: mol_type = other RNA
tattctgtagcttttgacg

SEQ ID NO: 2739 - RNA, 19 nt, synthetic construct
  source 1..19: mol_type = other RNA
tgattctgtagcttttgac

SEQ ID NO: 2740 - RNA, 19 nt, synthetic construct
  source 1..19: mol_type = other RNA
tgcccttttcatgtttaca

SEQ ID NO: 2741 - RNA, 19 nt, synthetic construct
  source 1..19: mol_type = other RNA
tagcccttttcatgtttac

SEQ ID NO: 2742 - RNA, 19 nt, synthetic construct
  source 1..19: mol_type = other RNA
tcaccagttctcatctgtt

SEQ ID NO: 2743 - RNA, 19 nt, synthetic construct
  source 1..19: mol_type = other RNA
tccaccagttctcatctgt

SEQ ID NO: 2744 - RNA, 19 nt, synthetic construct
  source 1..19: mol_type = other RNA
taccaccagttctcatctg

SEQ ID NO: 2745 - RNA, 19 nt, synthetic construct
  source 1..19: mol_type = other RNA
taaccaccagttctcatct

SEQ ID NO: 2746 - RNA, 19 nt, synthetic construct
  source 1..19: mol_type = other RNA
ttaaccaccagttctcatc

SEQ ID NO: 2747 - RNA, 19 nt, synthetic construct
  source 1..19: mol_type = other RNA
tttaaccaccagttctcat

SEQ ID NO: 2748 - RNA, 19 nt, synthetic construct
  source 1..19: mol_type = other RNA
tattaaccaccagttctca

SEQ ID NO: 2749 - RNA, 19 nt, synthetic construct
  source 1..19: mol_type = other RNA
ttattaaccaccagttctc

SEQ ID NO: 2750 - RNA, 19 nt, synthetic construct
  source 1..19: mol_type = other RNA
tatattaaccaccagttct

SEQ ID NO: 2751 - RNA, 19 nt, synthetic construct
  source 1..19: mol_type = other RNA
taggtttcatgattccaaa

SEQ ID NO: 2752 - RNA, 19 nt, synthetic construct
  source 1..19: mol_type = other RNA
taaggtttcatgattccaa

SEQ ID NO: 2753 - RNA, 19 nt, synthetic construct
  source 1..19: mol_type = other RNA
tattttctctagcttactt

SEQ ID NO: 2754 - RNA, 19 nt, synthetic construct
  source 1..19: mol_type = other RNA
tcattttctctagcttact

SEQ ID NO: 2755 - RNA, 19 nt, synthetic construct
  source 1..19: mol_type = other RNA
tacattttctctagcttac

SEQ ID NO: 2756 - RNA, 19 nt, synthetic construct
  source 1..19: mol_type = other RNA
tccacttccatttaatgaa

SEQ ID NO: 2757 - RNA, 19 nt, synthetic construct
  source 1..19: mol_type = other RNA
tcaatgagaatgaagactt

SEQ ID NO: 2758 - RNA, 19 nt, synthetic construct
  source 1..19: mol_type = other RNA
tacaatgagaatgaagact

SEQ ID NO: 2759 - RNA, 19 nt, synthetic construct
  source 1..19: mol_type = other RNA
tgacaatgagaatgaagac

SEQ ID NO: 2760 - RNA, 19 nt, synthetic construct
  source 1..19: mol_type = other RNA
tagacaatgagaatgaaga

SEQ ID NO: 2761 - RNA, 19 nt, synthetic construct
  source 1..19: mol_type = other RNA
tccacacccctaagacaag

SEQ ID NO: 2762 - RNA, 19 nt, synthetic construct
  source 1..19: mol_type = other RNA
ttccacttatacatgaata

SEQ ID NO: 2763 - RNA, 19 nt, synthetic construct
  source 1..19: mol_type = other RNA
tgggtccacttatacatga

What is claimed is:

1. An RNAi oligonucleotide comprising a sense strand and an antisense strand, wherein the sense strand and the antisense strand form a duplex, wherein the sense strand and antisense strands are selected from the group consisting of:

| SEQ ID | | SEQ | |
|---|---|---|---|
| NO: | Sense strand | ID NO: | Antisense strand |
| 1402 | ususguGfaAfAfAfggucaagaua | 2030 | usAfsucuUfgAfCfcuuuUfcAfcaasusu |
| 1403 | usgsugAfaAfAfGfgucaagauua | 2031 | usAfsaucUfuGfAfccuuUfuCfacasusu |
| 1404 | asasaaGfgUfCfAfagauuaagaa | 2032 | usUfscuuAfaUfCfuugaCfcUfuuususu |
| 1471 | uscscuGfaGfUfAfgaagaguuua | 2099 | usAfsaacUfcUfUfcuacUfcAfggasusu |
| 1472 | csusgaGfuAfGfAfagaguuucua | 2100 | usAfsgaaAfcUfCfuucuAfcUfcagsusu |
| 1474 | gsgsauCfuUfGfUfaaacaugaaa | 2102 | usUfsucaUfgUfUfuacaAfgAfuccsusu |
| 1670 | gscsuuGfcCfAfCfaucagcuuaa | 2298 | usUfsaagCfuGfAfugugGfcAfagcsusu |
| 1671 | csusugCfcAfCfAfucagcuuaaa | 2299 | usUfsuaaGfcUfGfauguGfgCfaagsusu |
| 1672 | ususgcCfaCfAfUfcagcuuaaaa | 2300 | usUfsuuaAfgCfUfgaugUfgGfcaasusu |
| 1688 | gsusgaAfaAfGfGfucaagauuaa | 2316 | usUfsaauCfuUfGfaccuUfuUfcacsusu |
| 1402 | ususguGfaAfAfAfggucaagaua | 2513 | vpUsAfsucuUfgAfCfcuuuUfcAfcaasusu |
| 1403 | usgsugAfaAfAfGfgucaagauua | 2514 | vpUsAfsaucUfuGfAfccuuUfuCfacasusu |
| 1404 | asasaaGfgUfCfAfagauuaagaa | 2515 | vpUsUfscuuAfaUfCfuugaCfcUfuuususu |
| 1471 | uscscuGfaGfUfAfgaagaguuua | 2516 | vpUsAfsaacUfcUfUfcuacUfcAfggasusu |
| 1472 | csusgaGfuAfGfAfagaguuucua | 2517 | vpUsAfsgaaAfcUfCfuucuAfcUfcagsusu |
| 1474 | gsgsauCfuUfGfUfaaacaugaaa | 2518 | vpUsUfsucaUfgUfUfuacaAfgAfuccsusu |
| 1670 | gscsuuGfcCfAfCfaucagcuuaa | 2519 | vpUsUfsaagCfuGfAfugugGfcAfagcsusu |
| 1671 | csusugCfcAfCfAfucagcuuaaa | 2520 | vpUsUfsuaaGfcUfGfauguGfgCfaagsusu |
| 1672 | ususgcCfaCfAfUfcagcuuaaaa | 2521 | vpUsUfsuuaAfgCfUfgaugUfgGfcaasusu |
| 1688 | gsusgaAfaAfGfGfucaagauuaa | 2522 | vpUsUfsaauCfuUfGfaccuUfuUfcacsusu |

wherein:
Af represents 2′-deoxy-2′-fluoro-adenosine-3′-phosphate;
Afs represents 2′-deoxy-2′-fluoro-adenosine-3′-phosphorothioate;
Cf represents 2′-deoxy-2′-fluoro-cytidine-3′-phosphate;
Gf represents 2′-deoxy-2′-fluoro-guanosine-3′-phosphate;
Uf represents 2′-deoxy-2′-fluoro-uridine-3′-phosphate;
Ufs represents 2′-deoxy-2′-fluoro-uridine-3′-phosphorothioate;
a represents 2′-O-methyl-adenosine-3′-phosphate;
as represents 2′-O-methyl-adenosine-3′-phosphorothioate;
c represents 2′-O-methyl-cytidine-3′-phosphate;
cs represents 2′-O-methyl-cytidine-3′-phosphorothioate;
g represents 2′-O-methyl-guanosine-3′-phosphate;
gs represents 2′-O-methyl-guanosine-3′-phosphorothioate;
u represents 2′-O-methyl-uridine-3′-phosphate;
us represents 2′-O-methyl-uridine-3′-phosphorothioate; and
vpUs represents 5′-vinylphosphonate-2′-O-methyl-uridine-3′-phosphorothioate.

2. The RNAi oligonucleotide of claim 1, wherein the sense strand is ususguGfaAfAfAfggucaagaua (SEQ ID NO: 1402), and the antisense strand is usAfsucuUfgAfCfcuuuUfcAfcaasusu (SEQ ID NO: 2030).

3. The RNAi oligonucleotide of claim 1, wherein the sense strand is usgsugAfaAfAfGfgucaagauua (SEQ ID NO: 1403), and the antisense strand is usAfsaucUfuGfAfccuuUfuCfacasusu (SEQ ID NO: 2031).

4. The RNAi oligonucleotide of claim 1, wherein the sense strand is asasaaGfgUfCfAfagauuaagaa(SEQ ID NO: 1404), and the antisense strand is usUfscuuAfaUfCfuugaCfcUfuuususu (SEQ ID NO: 2032).

5. The RNAi oligonucleotide of claim 1, wherein the sense strand is uscscuGfaGfUfAfgaagaguuua (SEQ ID NO: 1471), and the antisense strand is usAfsaacUfcUfUfcuacUfcAfggasusu (SEQ ID NO: 2099).

6. The RNAi oligonucleotide of claim 1, wherein the sense strand is csusgaGfuAfGfAfagaguuucua (SEQ ID NO: 1472), and the antisense strand is usAfsgaaAfcUfCfuucuAfcUfcagsusu (SEQ ID NO: 2100).

7. The RNAi oligonucleotide of claim 1, wherein the sense strand is gsgsauCfuUfGfUfaaacaugaaa(SEQ ID NO: 1474), and the antisense strand is usUfsucaUfgUfUfuacaAfgAfuccsusu (SEQ ID NO: 2102).

8. The RNAi oligonucleotide of claim 1, wherein the sense strand is gscsuuGfcCfAfCfaucagcuuaa(SEQ ID NO: 1670), and the antisense strand is usUfsaagCfuGfAfugugGfcAfagcsusu (SEQ ID NO: 2298).

9. The RNAi oligonucleotide of claim 1, wherein the sense strand is csusugCfcAfCfAfucagcuuaaa (SEQ ID NO: 1671), and the antisense strand is usUfsuaaGfcUfGfauguGfgCfaagsusu (SEQ ID NO: 2299).

10. The RNAi oligonucleotide of claim 1, wherein the sense strand is ususgcCfaCfAfUfcagcuuaaaa(SEQ ID NO: 1672), and the antisense strand is usUfsuuaAfgCfUfgaugUfgGfcaasusu (SEQ ID NO: 2300).

11. The RNAi oligonucleotide of claim 1, wherein the sense strand is gsusgaAfaAfGfGfucaagauuaa (SEQ ID NO: 1688), and the antisense strand is usUfsaauCfuUfGfaccuUfuUfcacsusu (SEQ ID NO: 2316).

12. The RNAi oligonucleotide of claim 1, wherein the sense strand is ususguGfaAfAfAfggucaagaua (SEQ ID NO: 1402), and the antisense strand is vpUsAfsucuUfgAfCfcuuuUfcAfcaasusu (SEQ ID NO: 2513).

13. The RNAi oligonucleotide of claim 1, wherein
the sense strand is usgsugAfaAfAfGfgucaagauua (SEQ ID NO: 1403), and the antisense strand is vpUsAfsaucUfuGfAfccuuUfuCfacasusu (SEQ ID NO: 2514).

14. The RNAi oligonucleotide of claim 1, wherein the sense strand is asasaaGfgUfCfAfagauuaagaa(SEQ ID NO: 1404), and the antisense strand is vpUsUfscuuAfaUfCfuugaCfcUfuuususu (SEQ ID NO: 2515).

15. The RNAi oligonucleotide of claim 1, wherein the sense strand is uscscuGfaGfUfAfgaagaguuua (SEQ ID NO: 1471), and the antisense strand is vpUsAfsaacUfcUfUfcuacUfcAfggasusu (SEQ ID NO: 2516).

16. The RNAi oligonucleotide of claim 1, wherein the sense strand is csusgaGfuAfGfAfagaguuucua (SEQ ID NO: 1472), and the antisense strand is vpUsAfsgaaAfcUfCfuucuAfcUfcagsusu (SEQ ID NO: 2517).

17. The RNAi oligonucleotide of claim 1, wherein the sense strand is gsgsauCfuUfGfUfaaacaugaaa (SEQ ID NO: 1474), and the antisense strand is vpUsUfsucaUfgUfUfuacaAfgAfuccsusu (SEQ ID NO: 2518).

18. The RNAi oligonucleotide of claim 1, wherein the sense strand is gscsuuGfcCfAfCfaucagcuuaa (SEQ ID NO: 1670), and the antisense strand is vpUsUfsaagCfuGfAfugugGfcAfagcsusu (SEQ ID NO: 2519).

19. The RNAi oligonucleotide of claim 1, wherein the sense strand is csusugCfcAfCfAfucagcuuaaa (SEQ ID NO: 1671), and the antisense strand is vpUsUfsuaaGfcUfGfauguGfgCfaagsusu (SEQ ID NO: 2520).

20. The RNAi oligonucleotide of claim 1, wherein the sense strand is ususgcCfaCfAfUfcagcuuaaaa(SEQ ID NO: 1672), and the antisense strand is vpUsUfsuuaAfgCfUfgaugUfgGfcaasusu (SEQ ID NO: 2521).

21. The RNAi oligonucleotide of claim 1, wherein the sense strand is gsusgaAfaAfGfGfucaagauuaa (SEQ ID NO: 1688), and the antisense strand is vpUsUfsaauCfuUfGfaccuUfuUfcacsusu (SEQ ID NO: 2522).

22. A pharmaceutical composition comprising the RNAi oligonucleotide of claim 1, or a pharmaceutically acceptable salt thereof, and a pharmaceutically acceptable carrier or excipient.

23. A method for inhibiting Phospholamban (PLN) expression or treating a PLN related disorder in a subject, the method comprising administering to the subject an effective amount of the RNAi oligonucleotide of claim 1, or a pharmaceutically acceptable salt thereof.
